United States Patent Application Publication US 2020/0095579 A1 - sequence listing, part 25

SEQ ID NO: 402827 - DNA, 20 bp, Artificial Sequence
  Description of Artificial Sequence: Synthetic oligonucleotide
  Target: LAMA2; (+) strand; PAM type: YTN; PAM sequence: CTT
ctagagatacagtattttga

SEQ ID NO: 402828 - DNA, 20 bp, Artificial Sequence
  Description of Artificial Sequence: Synthetic oligonucleotide
  Target: LAMA2; (+) strand; PAM type: YTN; PAM sequence: TTC
tagagatacagtattttgat

SEQ ID NO: 402829 - DNA, 20 bp, Artificial Sequence
  Description of Artificial Sequence: Synthetic oligonucleotide
  Target: LAMA2; (+) strand; PAM type: YTN; PAM sequence: CTA
gagatacagtattttgattt

SEQ ID NO: 402830 - DNA, 20 bp, Artificial Sequence
  Description of Artificial Sequence: Synthetic oligonucleotide
  Target: LAMA2; (+) strand; PAM type: YTN; PAM sequence: TTT
tgatttacctgatttcttct

SEQ ID NO: 402831 - DNA, 20 bp, Artificial Sequence
  Description of Artificial Sequence: Synthetic oligonucleotide
  Target: LAMA2; (+) strand; PAM type: YTN; PAM sequence: TTT
gatttacctgatttcttcta

SEQ ID NO: 402832 - DNA, 20 bp, Artificial Sequence
  Description of Artificial Sequence: Synthetic oligonucleotide
  Target: LAMA2; (+) strand; PAM type: YTN; PAM sequence: TTG
atttacctgatttcttctag

SEQ ID NO: 402833 - DNA, 20 bp, Artificial Sequence
  Description of Artificial Sequence: Synthetic oligonucleotide
  Target: LAMA2; (+) strand; PAM type: YTN; PAM sequence: TTT
acctgatttcttctagagat

SEQ ID NO: 402834 - DNA, 20 bp, Artificial Sequence
  Description of Artificial Sequence: Synthetic oligonucleotide
  Target: LAMA2; (+) strand; PAM type: YTN; PAM sequence: TTA
cctgatttcttctagagata

SEQ ID NO: 402835 - DNA, 20 bp, Artificial Sequence
  Description of Artificial Sequence: Synthetic oligonucleotide
  Target: LAMA2; (+) strand; PAM type: YTN; PAM sequence: CTG
atttcttctagagatatagt

SEQ ID NO: 402836 - DNA, 20 bp, Artificial Sequence
  Description of Artificial Sequence: Synthetic oligonucleotide
  Target: LAMA2; (+) strand; PAM type: YTN; PAM sequence: TTT
cttctagagatatagtattt

SEQ ID NO: 402837 - DNA, 20 bp, Artificial Sequence
  Description of Artificial Sequence: Synthetic oligonucleotide
  Target: LAMA2; (+) strand; PAM type: YTN; PAM sequence: TTC
ttctagagatatagtatttt

SEQ ID NO: 402838 - DNA, 20 bp, Artificial Sequence
  Description of Artificial Sequence: Synthetic oligonucleotide
  Target: LAMA2; (+) strand; PAM type: YTN; PAM sequence: CTT
ctagagatatagtattttga

SEQ ID NO: 402839 - DNA, 20 bp, Artificial Sequence
  Description of Artificial Sequence: Synthetic oligonucleotide
  Target: LAMA2; (+) strand; PAM type: YTN; PAM sequence: TTC
tagagatatagtattttgat

SEQ ID NO: 402840 - DNA, 20 bp, Artificial Sequence
  Description of Artificial Sequence: Synthetic oligonucleotide
  Target: LAMA2; (+) strand; PAM type: YTN; PAM sequence: CTA
gagatatagtattttgattt

SEQ ID NO: 402841 - DNA, 20 bp, Artificial Sequence
  Description of Artificial Sequence: Synthetic oligonucleotide
  Target: LAMA2; (+) strand; PAM type: YTN; PAM sequence: TTT
tgatttacctgatttcttct

SEQ ID NO: 402842 - DNA, 20 bp, Artificial Sequence
  Description of Artificial Sequence: Synthetic oligonucleotide
  Target: LAMA2; (+) strand; PAM type: YTN; PAM sequence: TTT
gatttacctgatttcttcta

SEQ ID NO: 402843 - DNA, 20 bp, Artificial Sequence
  Description of Artificial Sequence: Synthetic oligonucleotide
  Target: LAMA2; (+) strand; PAM type: YTN; PAM sequence: TTG
atttacctgatttcttctag

SEQ ID NO: 402844 - DNA, 20 bp, Artificial Sequence
  Description of Artificial Sequence: Synthetic oligonucleotide
  Target: LAMA2; (+) strand; PAM type: YTN; PAM sequence: TTT
acctgatttcttctagagat

SEQ ID NO: 402845 - DNA, 20 bp, Artificial Sequence
  Description of Artificial Sequence: Synthetic oligonucleotide
  Target: LAMA2; (+) strand; PAM type: YTN; PAM sequence: TTA
cctgatttcttctagagata

SEQ ID NO: 402846 - DNA, 20 bp, Artificial Sequence
  Description of Artificial Sequence: Synthetic oligonucleotide
  Target: LAMA2; (+) strand; PAM type: YTN; PAM sequence: CTG
atttcttctagagatacagt

SEQ ID NO: 402847 - DNA, 20 bp, Artificial Sequence
  Description of Artificial Sequence: Synthetic oligonucleotide
  Target: LAMA2; (+) strand; PAM type: YTN; PAM sequence: TTT
cttctagagatacagtattt

SEQ ID NO: 402848 - DNA, 20 bp, Artificial Sequence
  Description of Artificial Sequence: Synthetic oligonucleotide
  Target: LAMA2; (+) strand; PAM type: YTN; PAM sequence: TTC
ttctagagatacagtatttt

SEQ ID NO: 402849 - DNA, 20 bp, Artificial Sequence
  Description of Artificial Sequence: Synthetic oligonucleotide
  Target: LAMA2; (+) strand; PAM type: YTN; PAM sequence: CTT
ctagagatacagtattttga

SEQ ID NO: 402850 - DNA, 20 bp, Artificial Sequence
  Description of Artificial Sequence: Synthetic oligonucleotide
  Target: LAMA2; (+) strand; PAM type: YTN; PAM sequence: TTC
tagagatacagtattttgat

SEQ ID NO: 402851 - DNA, 20 bp, Artificial Sequence
  Description of Artificial Sequence: Synthetic oligonucleotide
  Target: LAMA2; (+) strand; PAM type: YTN; PAM sequence: CTA
gagatacagtattttgattt

SEQ ID NO: 402852 - DNA, 20 bp, Artificial Sequence
  Description of Artificial Sequence: Synthetic oligonucleotide
  Target: LAMA2; (+) strand; PAM type: YTN; PAM sequence: TTT
tgatttacctgttttaagtt

SEQ ID NO: 402853 - DNA, 20 bp, Artificial Sequence
  Description of Artificial Sequence: Synthetic oligonucleotide
  Target: LAMA2; (+) strand; PAM type: YTN; PAM sequence: TTT
gatttacctgttttaagttg

SEQ ID NO: 402854 - DNA, 20 bp, Artificial Sequence
  Description of Artificial Sequence: Synthetic oligonucleotide
  Target: LAMA2; (+) strand; PAM type: YTN; PAM sequence: TTG
atttacctgttttaagttgt

SEQ ID NO: 402855 - DNA, 20 bp, Artificial Sequence
  Description of Artificial Sequence: Synthetic oligonucleotide
  Target: LAMA2; (+) strand; PAM type: YTN; PAM sequence: TTT
acctgttttaagttgtttaa

SEQ ID NO: 402856 - DNA, 20 bp, Artificial Sequence
  Description of Artificial Sequence: Synthetic oligonucleotide
  Target: LAMA2; (+) strand; PAM type: YTN; PAM sequence: TTA
cctgttttaagttgtttaaa

SEQ ID NO: 402857 - DNA, 20 bp, Artificial Sequence
  Description of Artificial Sequence: Synthetic oligonucleotide
  Target: LAMA2; (+) strand; PAM type: YTN; PAM sequence: CTG
ttttaagttgtttaaaagaa

SEQ ID NO: 402858 - DNA, 20 bp, Artificial Sequence
  Description of Artificial Sequence: Synthetic oligonucleotide
  Target: LAMA2; (+) strand; PAM type: YTN; PAM sequence: TTT
taagttgtttaaaagaaata

SEQ ID NO: 402859 - DNA, 20 bp, Artificial Sequence
  Description of Artificial Sequence: Synthetic oligonucleotide
  Target: LAMA2; (+) strand; PAM type: YTN; PAM sequence: TTT
aagttgtttaaaagaaatac

SEQ ID NO: 402860 - DNA, 20 bp, Artificial Sequence
  Description of Artificial Sequence: Synthetic oligonucleotide
  Target: LAMA2; (+) strand; PAM type: YTN; PAM sequence: TTA
agttgtttaaaagaaatacc

SEQ ID NO: 402861 - DNA, 20 bp, Artificial Sequence
  Description of Artificial Sequence: Synthetic oligonucleotide
  Target: LAMA2; (+) strand; PAM type: YTN; PAM sequence: TTG
tttaaaagaaatacctataa

SEQ ID NO: 402862 - DNA, 20 bp, Artificial Sequence
  Description of Artificial Sequence: Synthetic oligonucleotide
  Target: LAMA2; (+) strand; PAM type: YTN; PAM sequence: TTT
aaaagaaatacctataactg

SEQ ID NO: 402863 - DNA, 20 bp, Artificial Sequence
  Description of Artificial Sequence: Synthetic oligonucleotide
  Target: LAMA2; (+) strand; PAM type: YTN; PAM sequence: TTA
aaagaaatacctataactga

SEQ ID NO: 402864 - DNA, 20 bp, Artificial Sequence
  Description of Artificial Sequence: Synthetic oligonucleotide
  Target: LAMA2; (+) strand; PAM type: YTN; PAM sequence: CTA
taactgaaaatcaaaacaga

SEQ ID NO: 402865 - DNA, 20 bp, Artificial Sequence
  Description of Artificial Sequence: Synthetic oligonucleotide
  Target: LAMA2; (+) strand; PAM type: YTN; PAM sequence: CTG
aaaatcaaaacagaaagtat

SEQ ID NO: 402866 - DNA, 20 bp, Artificial Sequence
  Description of Artificial Sequence: Synthetic oligonucleotide
  Target: LAMA2; (+) strand; PAM type: YTN; PAM sequence: TTC
aaaaggaaaagactactgat

SEQ ID NO: 402867 - DNA, 20 bp, Artificial Sequence
  Description of Artificial Sequence: Synthetic oligonucleotide
  Target: LAMA2; (+) strand; PAM type: YTN; PAM sequence: CTA
ctgattatgtactggctgtc

SEQ ID NO: 402868 - DNA, 20 bp, Artificial Sequence
  Description of Artificial Sequence: Synthetic oligonucleotide
  Target: LAMA2; (+) strand; PAM type: YTN; PAM sequence: CTG
attatgtactggctgtcaac

SEQ ID NO: 402869 - DNA, 20 bp, Artificial Sequence
  Description of Artificial Sequence: Synthetic oligonucleotide
  Target: LAMA2; (+) strand; PAM type: YTN; PAM sequence: TTA
tgtactggctgtcaacagtt

SEQ ID NO: 402870 - DNA, 20 bp, Artificial Sequence
  Description of Artificial Sequence: Synthetic oligonucleotide
  Target: LAMA2; (+) strand; PAM type: YTN; PAM sequence: CTG
gctgtcaacagtttgggcta

SEQ ID NO: 402871 - DNA, 20 bp, Artificial Sequence
  Description of Artificial Sequence: Synthetic oligonucleotide
  Target: LAMA2; (+) strand; PAM type: YTN; PAM sequence: CTG
tcaacagtttgggctaagtg

SEQ ID NO: 402872 - DNA, 20 bp, Artificial Sequence
  Description of Artificial Sequence: Synthetic oligonucleotide
  Target: LAMA2; (+) strand; PAM type: YTN; PAM sequence: TTT
gggctaagtgaatgtttcag

SEQ ID NO: 402873 - DNA, 20 bp, Artificial Sequence
  Description of Artificial Sequence: Synthetic oligonucleotide
  Target: LAMA2; (+) strand; PAM type: YTN; PAM sequence: TTG
ggctaagtgaatgtttcagt

SEQ ID NO: 402874 - DNA, 20 bp, Artificial Sequence
  Description of Artificial Sequence: Synthetic oligonucleotide
  Target: LAMA2; (+) strand; PAM type: YTN; PAM sequence: CTA
agtgaatgtttcagtttctg

SEQ ID NO: 402875 - DNA, 20 bp, Artificial Sequence
  Description of Artificial Sequence: Synthetic oligonucleotide
  Target: LAMA2; (+) strand; PAM type: YTN; PAM sequence: TTT
cagtttctgagagtatattc

SEQ ID NO: 402876 - DNA, 20 bp, Artificial Sequence
  Description of Artificial Sequence: Synthetic oligonucleotide
  Target: LAMA2; (+) strand; PAM type: YTN; PAM sequence: TTC
agtttctgagagtatattca

SEQ ID NO: 402877 - DNA, 20 bp, Artificial Sequence
  Description of Artificial Sequence: Synthetic oligonucleotide
  Target: LAMA2; (+) strand; PAM type: YTN; PAM sequence: TTT
ctgagagtatattcaaaacc

SEQ ID NO: 402878 - DNA, 20 bp, Artificial Sequence
  Description of Artificial Sequence: Synthetic oligonucleotide
  Target: LAMA2; (+) strand; PAM type: YTN; PAM sequence: TTC
tgagagtatattcaaaacca

SEQ ID NO: 402879 - DNA, 20 bp, Artificial Sequence
  Description of Artificial Sequence: Synthetic oligonucleotide
  Target: LAMA2; (+) strand; PAM type: YTN; PAM sequence: CTG
agagtatattcaaaaccaga

SEQ ID NO: 402880 - DNA, 20 bp, Artificial Sequence
  Description of Artificial Sequence: Synthetic oligonucleotide
  Target: LAMA2; (+) strand; PAM type: YTN; PAM sequence: TTC
aaaaccagaaaacagaaagc

SEQ ID NO: 402881 - DNA, 20 bp, Artificial Sequence
  Description of Artificial Sequence: Synthetic oligonucleotide
  Target: LAMA2; (+) strand; PAM type: YTN; PAM sequence: TTT
tctatatgaatgtgtgagag

SEQ ID NO: 402882 - DNA, 20 bp, Artificial Sequence
  Description of Artificial Sequence: Synthetic oligonucleotide
  Target: LAMA2; (+) strand; PAM type: YTN; PAM sequence: TTT
ctatatgaatgtgtgagagc

SEQ ID NO: 402883 - DNA, 20 bp, Artificial Sequence
  Description of Artificial Sequence: Synthetic oligonucleotide
  Target: LAMA2; (+) strand; PAM type: YTN; PAM sequence: TTC
tatatgaatgtgtgagagct

SEQ ID NO: 402884 - DNA, 20 bp, Artificial Sequence
  Description of Artificial Sequence: Synthetic oligonucleotide
  Target: LAMA2; (+) strand; PAM type: YTN; PAM sequence: CTA
tatgaatgtgtgagagctgg

SEQ ID NO: 402885 - DNA, 20 bp, Artificial Sequence
  Description of Artificial Sequence: Synthetic oligonucleotide
  Target: LAMA2; (+) strand; PAM type: YTN; PAM sequence: CTG
ggcaatagattactgtctag

SEQ ID NO: 402886 - DNA, 20 bp, Artificial Sequence
  Description of Artificial Sequence: Synthetic oligonucleotide
  Target: LAMA2; (+) strand; PAM type: YTN; PAM sequence: TTA
ctgtctagtccacttcatgc

SEQ ID NO: 402887 - DNA, 20 bp, Artificial Sequence
  Description of Artificial Sequence: Synthetic oligonucleotide
  Target: LAMA2; (+) strand; PAM type: YTN; PAM sequence: CTG
tctagtccacttcatgctgc

SEQ ID NO: 402888 - DNA, 20 bp, Artificial Sequence
  Description of Artificial Sequence: Synthetic oligonucleotide
  Target: LAMA2; (+) strand; PAM type: YTN; PAM sequence: CTA
gtccacttcatgctgctgtg

SEQ ID NO: 402889 - DNA, 20 bp, Artificial Sequence
  Description of Artificial Sequence: Synthetic oligonucleotide
  Target: LAMA2; (+) strand; PAM type: YTN; PAM sequence: CTT
catgctgctgtgacagagta

SEQ ID NO: 402890 - DNA, 20 bp, Artificial Sequence
  Description of Artificial Sequence: Synthetic oligonucleotide
  Target: LAMA2; (+) strand; PAM type: YTN; PAM sequence: TTC
atgctgctgtgacagagtat

SEQ ID NO: 402891 - DNA, 20 bp, Artificial Sequence
  Description of Artificial Sequence: Synthetic oligonucleotide
  Target: LAMA2; (+) strand; PAM type: YTN; PAM sequence: CTG
ctgtgacagagtattacaga

SEQ ID NO: 402892 - DNA, 20 bp, Artificial Sequence
  Description of Artificial Sequence: Synthetic oligonucleotide
  Target: LAMA2; (+) strand; PAM type: YTN; PAM sequence: CTG
tgacagagtattacagactg

SEQ ID NO: 402893 - DNA, 20 bp, Artificial Sequence
  Description of Artificial Sequence: Synthetic oligonucleotide
  Target: LAMA2; (+) strand; PAM type: YTN; PAM sequence: TTA
cagactgggtaatttataaa

SEQ ID NO: 402894 - DNA, 20 bp, Artificial Sequence
  Description of Artificial Sequence: Synthetic oligonucleotide
  Target: LAMA2; (+) strand; PAM type: YTN; PAM sequence: CTG
ggtaatttataaagaaaata

SEQ ID NO: 402895 - DNA, 20 bp, Artificial Sequence
  Description of Artificial Sequence: Synthetic oligonucleotide
  Target: LAMA2; (+) strand; PAM type: YTN; PAM sequence: TTT
ataaagaaaataaatttatt

SEQ ID NO: 402896 - DNA, 20 bp, Artificial Sequence
  Description of Artificial Sequence: Synthetic oligonucleotide
  Target: LAMA2; (+) strand; PAM type: YTN; PAM sequence: TTA
taaagaaaataaatttattc

SEQ ID NO: 402897 - DNA, 20 bp, Artificial Sequence
  Description of Artificial Sequence: Synthetic oligonucleotide
  Target: LAMA2; (+) strand; PAM type: YTN; PAM sequence: TTT
attctcacagttctggagac

SEQ ID NO: 402898 - DNA, 20 bp, Artificial Sequence
  Description of Artificial Sequence: Synthetic oligonucleotide
  Target: LAMA2; (+) strand; PAM type: YTN; PAM sequence: TTA
ttctcacagttctggagact

SEQ ID NO: 402899 - DNA, 20 bp, Artificial Sequence
  Description of Artificial Sequence: Synthetic oligonucleotide
  Target: LAMA2; (+) strand; PAM type: YTN; PAM sequence: TTC
tcacagttctggagactggg

SEQ ID NO: 402900 - DNA, 20 bp, Artificial Sequence
  Description of Artificial Sequence: Synthetic oligonucleotide
  Target: LAMA2; (+) strand; PAM type: YTN; PAM sequence: CTC
acagttctggagactgggaa

SEQ ID NO: 402901 - DNA, 20 bp, Artificial Sequence
  Description of Artificial Sequence: Synthetic oligonucleotide
  Target: LAMA2; (+) strand; PAM type: YTN; PAM sequence: TTC
tggagactgggaagtccaag

SEQ ID NO: 402902 - DNA, 20 bp, Artificial Sequence
  Description of Artificial Sequence: Synthetic oligonucleotide
  Target: LAMA2; (+) strand; PAM type: YTN; PAM sequence: CTG
gagactgggaagtccaagat

SEQ ID NO: 402903 - DNA, 20 bp, Artificial Sequence
  Description of Artificial Sequence: Synthetic oligonucleotide
  Target: LAMA2; (+) strand; PAM type: YTN; PAM sequence: CTG
ggaagtccaagatcaagatg

SEQ ID NO: 402904 - DNA, 20 bp, Artificial Sequence
  Description of Artificial Sequence: Synthetic oligonucleotide
  Target: LAMA2; (+) strand; PAM type: YTN; PAM sequence: CTG
gcaggttagggacctgtttt

SEQ ID NO: 402905 - DNA, 20 bp, Artificial Sequence
  Description of Artificial Sequence: Synthetic oligonucleotide
  Target: LAMA2; (+) strand; PAM type: YTN; PAM sequence: TTA
gggacctgtttttatgcttc

SEQ ID NO: 402906 - DNA, 20 bp, Artificial Sequence
  Description of Artificial Sequence: Synthetic oligonucleotide
  Target: LAMA2; (+) strand; PAM type: YTN; PAM sequence: CTG
tttttatgcttccaagatgg

SEQ ID NO: 402907 - DNA, 20 bp, Artificial Sequence
  Description of Artificial Sequence: Synthetic oligonucleotide
  Target: LAMA2; (+) strand; PAM type: YTN; PAM sequence: TTT
ttatgcttccaagatggcac

SEQ ID NO: 402908 - DNA, 20 bp, Artificial Sequence
  Description of Artificial Sequence: Synthetic oligonucleotide
  Target: LAMA2; (+) strand; PAM type: YTN; PAM sequence: TTT
tatgcttccaagatggcact

SEQ ID NO: 402909 - DNA, 20 bp, Artificial Sequence
  Description of Artificial Sequence: Synthetic oligonucleotide
  Target: LAMA2; (+) strand; PAM type: YTN; PAM sequence: TTT
atgcttccaagatggcactt

SEQ ID NO: 402910 - DNA, 20 bp, Artificial Sequence
  Description of Artificial Sequence: Synthetic oligonucleotide
  Target: LAMA2; (+) strand; PAM type: YTN; PAM sequence: TTA
tgcttccaagatggcacttt

SEQ ID NO: 402911 - DNA, 20 bp, Artificial Sequence
  Description of Artificial Sequence: Synthetic oligonucleotide
  Target: LAMA2; (+) strand; PAM type: YTN; PAM sequence: CTT
ccaagatggcactttgaatg

SEQ ID NO: 402912 - DNA, 20 bp, Artificial Sequence
  Description of Artificial Sequence: Synthetic oligonucleotide
  Target: LAMA2; (+) strand; PAM type: YTN; PAM sequence: TTC
caagatggcactttgaatgc

SEQ ID NO: 402913 - DNA, 20 bp, Artificial Sequence
  Description of Artificial Sequence: Synthetic oligonucleotide
  Target: LAMA2; (+) strand; PAM type: YTN; PAM sequence: CTT
tgaatgctcaggagaggagg

SEQ ID NO: 402914 - DNA, 20 bp, Artificial Sequence
  Description of Artificial Sequence: Synthetic oligonucleotide
  Target: LAMA2; (+) strand; PAM type: YTN; PAM sequence: TTT
gaatgctcaggagaggagga

SEQ ID NO: 402915 - DNA, 20 bp, Artificial Sequence
  Description of Artificial Sequence: Synthetic oligonucleotide
  Target: LAMA2; (+) strand; PAM type: YTN; PAM sequence: TTG
aatgctcaggagaggaggaa

SEQ ID NO: 402916 - DNA, 20 bp, Artificial Sequence
  Description of Artificial Sequence: Synthetic oligonucleotide
  Target: LAMA2; (+) strand; PAM type: YTN; PAM sequence: CTC
aggagaggaggaacattgtg

SEQ ID NO: 402917 - DNA, 20 bp, Artificial Sequence
  Description of Artificial Sequence: Synthetic oligonucleotide
  Target: LAMA2; (+) strand; PAM type: YTN; PAM sequence: TTG
tgccctcacatggcagaaga

SEQ ID NO: 402918 - DNA, 20 bp, Artificial Sequence
  Description of Artificial Sequence: Synthetic oligonucleotide
  Target: LAMA2; (+) strand; PAM type: YTN; PAM sequence: CTC
acatggcagaagagcaagag

SEQ ID NO: 402919 - DNA, 20 bp, Artificial Sequence
  Description of Artificial Sequence: Synthetic oligonucleotide
  Target: LAMA2; (+) strand; PAM type: YTN; PAM sequence: CTC
tcacccctgtaagccttttt

SEQ ID NO: 402920 - DNA, 20 bp, Artificial Sequence
  Description of Artificial Sequence: Synthetic oligonucleotide
  Target: LAMA2; (+) strand; PAM type: YTN; PAM sequence: CTC
acccctgtaagcctttttaa

SEQ ID NO: 402921 - DNA, 20 bp, Artificial Sequence
  Description of Artificial Sequence: Synthetic oligonucleotide
  Target: LAMA2; (+) strand; PAM type: YTN; PAM sequence: CTG
taagcctttttaatagtggc

SEQ ID NO: 402922 - DNA, 20 bp, Artificial Sequence
  Description of Artificial Sequence: Synthetic oligonucleotide
  Target: LAMA2; (+) strand; PAM type: YTN; PAM sequence: CTT
tttaatagtggcatcaattc

SEQ ID NO: 402923 - DNA, 20 bp, Artificial Sequence
  Description of Artificial Sequence: Synthetic oligonucleotide
  Target: LAMA2; (+) strand; PAM type: YTN; PAM sequence: TTT
ttaatagtggcatcaattca

SEQ ID NO: 402924 - DNA, 20 bp, Artificial Sequence
  Description of Artificial Sequence: Synthetic oligonucleotide
  Target: LAMA2; (+) strand; PAM type: YTN; PAM sequence: TTT
taatagtggcatcaattcat

SEQ ID NO: 402925 - DNA, 20 bp, Artificial Sequence
  Description of Artificial Sequence: Synthetic oligonucleotide
  Target: LAMA2; (+) strand; PAM type: YTN; PAM sequence: TTT
aatagtggcatcaattcatt

SEQ ID NO: 402926 - DNA, 20 bp, Artificial Sequence
  Description of Artificial Sequence: Synthetic oligonucleotide
  Target: LAMA2; (+) strand; PAM type: YTN; PAM sequence: TTA
atagtggcatcaattcattc

SEQ ID NO: 402927 - DNA, 20 bp, Artificial Sequence
  Description of Artificial Sequence: Synthetic oligonucleotide
  Target: LAMA2; (+) strand; PAM type: YTN; PAM sequence: TTC
attcatgaggacagagccct

SEQ ID NO: 402928 - DNA, 20 bp, Artificial Sequence
  Description of Artificial Sequence: Synthetic oligonucleotide
  Target: LAMA2; (+) strand; PAM type: YTN; PAM sequence: TTC
atgaggacagagccctcatg

SEQ ID NO: 402929 - DNA, 20 bp, Artificial Sequence
  Description of Artificial Sequence: Synthetic oligonucleotide
  Target: LAMA2; (+) strand; PAM type: YTN; PAM sequence: CTC
atgaccgaaacacttcccaa

SEQ ID NO: 402930 - DNA, 20 bp, Artificial Sequence
  Description of Artificial Sequence: Synthetic oligonucleotide
  Target: LAMA2; (+) strand; PAM type: YTN; PAM sequence: CTT
cccaaaaggcccccctccca

SEQ ID NO: 402931 - DNA, 20 bp, Artificial Sequence
  Description of Artificial Sequence: Synthetic oligonucleotide
  Target: LAMA2; (+) strand; PAM type: YTN; PAM sequence: TTC
ccaaaaggcccccctcccaa

SEQ ID NO: 402932 - DNA, 20 bp, Artificial Sequence
  Description of Artificial Sequence: Synthetic oligonucleotide
  Target: LAMA2; (+) strand; PAM type: YTN; PAM sequence: CTC
ccaacactgttgcactgagg

SEQ ID NO: 402933 - DNA, 20 bp, Artificial Sequence
  Description of Artificial Sequence: Synthetic oligonucleotide
  Target: LAMA2; (+) strand; PAM type: YTN; PAM sequence: CTG
ttgcactgaggattaaattt

SEQ ID NO: 402934 - DNA, 20 bp, Artificial Sequence
  Description of Artificial Sequence: Synthetic oligonucleotide
  Target: LAMA2; (+) strand; PAM type: YTN; PAM sequence: TTG
cactgaggattaaatttcaa

SEQ ID NO: 402935 - DNA, 20 bp, Artificial Sequence
  Description of Artificial Sequence: Synthetic oligonucleotide
  Target: LAMA2; (+) strand; PAM type: YTN; PAM sequence: CTG
aggattaaatttcaagcaaa

SEQ ID NO: 402936 - DNA, 20 bp, Artificial Sequence
  Description of Artificial Sequence: Synthetic oligonucleotide
  Target: LAMA2; (+) strand; PAM type: YTN; PAM sequence: TTA
aatttcaagcaaatgaattt

SEQ ID NO: 402937 - DNA, 20 bp, Artificial Sequence
  Description of Artificial Sequence: Synthetic oligonucleotide
  Target: LAMA2; (+) strand; PAM type: YTN; PAM sequence: TTT
caagcaaatgaattttgttg

SEQ ID NO: 402938 - DNA, 20 bp, Artificial Sequence
  Description of Artificial Sequence: Synthetic oligonucleotide
  Target: LAMA2; (+) strand; PAM type: YTN; PAM sequence: TTC
aagcaaatgaattttgttgg

SEQ ID NO: 402939 - DNA, 20 bp, Artificial Sequence
  Description of Artificial Sequence: Synthetic oligonucleotide
  Target: LAMA2; (+) strand; PAM type: YTN; PAM sequence: TTT
tgttggacacattcaagcca

SEQ ID NO: 402940 - DNA, 20 bp, Artificial Sequence
  Description of Artificial Sequence: Synthetic oligonucleotide
  Target: LAMA2; (+) strand; PAM type: YTN; PAM sequence: TTT
gttggacacattcaagccat

SEQ ID NO: 402941 - DNA, 20 bp, Artificial Sequence
  Description of Artificial Sequence: Synthetic oligonucleotide
  Target: LAMA2; (+) strand; PAM type: YTN; PAM sequence: TTG
ttggacacattcaagccata

SEQ ID NO: 402942 - DNA, 20 bp, Artificial Sequence
  Description of Artificial Sequence: Synthetic oligonucleotide
  Target: LAMA2; (+) strand; PAM type: YTN; PAM sequence: TTG
gacacattcaagccatagca

SEQ ID NO: 402943 - DNA, 20 bp, Artificial Sequence
  Description of Artificial Sequence: Synthetic oligonucleotide
  Target: LAMA2; (+) strand; PAM type: YTN; PAM sequence: TTC
aagccatagcagttactctg

SEQ ID NO: 402944 - DNA, 20 bp, Artificial Sequence
  Description of Artificial Sequence: Synthetic oligonucleotide
  Target: LAMA2; (+) strand; PAM type: YTN; PAM sequence: TTA
ctctgtaggattaattgccg

SEQ ID NO: 402945 - DNA, 20 bp, Artificial Sequence
  Description of Artificial Sequence: Synthetic oligonucleotide
  Target: LAMA2; (+) strand; PAM type: YTN; PAM sequence: CTC
tgtaggattaattgccggca

SEQ ID NO: 402946 - DNA, 20 bp, Artificial Sequence
  Description of Artificial Sequence: Synthetic oligonucleotide
  Target: LAMA2; (+) strand; PAM type: YTN; PAM sequence: CTG
taggattaattgccggcata

SEQ ID NO: 402947 - DNA, 20 bp, Artificial Sequence
  Description of Artificial Sequence: Synthetic oligonucleotide
  Target: LAMA2; (+) strand; PAM type: YTN; PAM sequence: TTA
attgccggcatattgggtat

SEQ ID NO: 402948 - DNA, 20 bp, Artificial Sequence
  Description of Artificial Sequence: Synthetic oligonucleotide
  Target: LAMA2; (+) strand; PAM type: YTN; PAM sequence: TTG
ccggcatattgggtataaca

SEQ ID NO: 402949 - DNA, 20 bp, Artificial Sequence
  Description of Artificial Sequence: Synthetic oligonucleotide
  Target: LAMA2; (+) strand; PAM type: YTN; PAM sequence: TTG
ggtataacaacatcattttg

SEQ ID NO: 402950 - DNA, 20 bp, Artificial Sequence
  Description of Artificial Sequence: Synthetic oligonucleotide
  Target: LAMA2; (+) strand; PAM type: YTN; PAM sequence: TTT
tgcttcaagaatcatatttg

SEQ ID NO: 402951 - DNA, 20 bp, Artificial Sequence
  Description of Artificial Sequence: Synthetic oligonucleotide
  Target: LAMA2; (+) strand; PAM type: YTN; PAM sequence: TTT
gcttcaagaatcatatttgt

SEQ ID NO: 402952 - DNA, 20 bp, Artificial Sequence
  Description of Artificial Sequence: Synthetic oligonucleotide
  Target: LAMA2; (+) strand; PAM type: YTN; PAM sequence: TTG
cttcaagaatcatatttgtt

SEQ ID NO: 402953 - DNA, 20 bp, Artificial Sequence
  Description of Artificial Sequence: Synthetic oligonucleotide
  Target: LAMA2; (+) strand; PAM type: YTN; PAM sequence: CTT
caagaatcatatttgttaga

SEQ ID NO: 402954 - DNA, 20 bp, Artificial Sequence
  Description of Artificial Sequence: Synthetic oligonucleotide
  Target: LAMA2; (+) strand; PAM type: YTN; PAM sequence: TTC
aagaatcatatttgttagat

SEQ ID NO: 402955 - DNA, 20 bp, Artificial Sequence
  Description of Artificial Sequence: Synthetic oligonucleotide
  Target: LAMA2; (+) strand; PAM type: YTN; PAM sequence: TTT
gttagatatgtattctatac

SEQ ID NO: 402956 - DNA, 20 bp, Artificial Sequence
  Description of Artificial Sequence: Synthetic oligonucleotide
  Target: LAMA2; (+) strand; PAM type: YTN; PAM sequence: TTG
ttagatatgtattctataca

SEQ ID NO: 402957 - DNA, 20 bp, Artificial Sequence
  Description of Artificial Sequence: Synthetic oligonucleotide
  Target: LAMA2; (+) strand; PAM type: YTN; PAM sequence: TTA
gatatgtattctatacaata

SEQ ID NO: 402958 - DNA, 20 bp, Artificial Sequence
  Description of Artificial Sequence: Synthetic oligonucleotide
  Target: LAMA2; (+) strand; PAM type: YTN; PAM sequence: TTC
tatacaatagattggttgta

SEQ ID NO: 402959 - DNA, 20 bp, Artificial Sequence
  Description of Artificial Sequence: Synthetic oligonucleotide
  Target: LAMA2; (+) strand; PAM type: YTN; PAM sequence: CTA
tacaatagattggttgtaac

SEQ ID NO: 402960 - DNA, 20 bp, Artificial Sequence
  Description of Artificial Sequence: Synthetic oligonucleotide
  Target: LAMA2; (+) strand; PAM type: YTN; PAM sequence: TTG
gttgtaacctctagtgacat

SEQ ID NO: 402961 - DNA, 20 bp, Artificial Sequence
  Description of Artificial Sequence: Synthetic oligonucleotide
  Target: LAMA2; (+) strand; PAM type: YTN; PAM sequence: TTG
taacctctagtgacattaga

SEQ ID NO: 402962 - DNA, 20 bp, Artificial Sequence
  Description of Artificial Sequence: Synthetic oligonucleotide
  Target: LAMA2; (+) strand; PAM type: YTN; PAM sequence: CTC
tagtgacattagatactcag

SEQ ID NO: 402963 - DNA, 20 bp, Artificial Sequence
  Description of Artificial Sequence: Synthetic oligonucleotide
  Target: LAMA2; (+) strand; PAM type: YTN; PAM sequence: CTA
gtgacattagatactcagtt

SEQ ID NO: 402964 - DNA, 20 bp, Artificial Sequence
  Description of Artificial Sequence: Synthetic oligonucleotide
  Target: LAMA2; (+) strand; PAM type: YTN; PAM sequence: TTA
gatactcagttttaaaatgg

SEQ ID NO: 402965 - DNA, 20 bp, Artificial Sequence
  Description of Artificial Sequence: Synthetic oligonucleotide
  Target: LAMA2; (+) strand; PAM type: YTN; PAM sequence: CTC
agttttaaaatggcttctct

SEQ ID NO: 402966 - DNA, 20 bp, Artificial Sequence
  Description of Artificial Sequence: Synthetic oligonucleotide
  Target: LAMA2; (+) strand; PAM type: YTN; PAM sequence: TTT
taaaatggcttctctcttag

SEQ ID NO: 402967 - DNA, 20 bp, Artificial Sequence
  Description of Artificial Sequence: Synthetic oligonucleotide
  Target: LAMA2; (+) strand; PAM type: YTN; PAM sequence: TTT
aaaatggcttctctcttaga

SEQ ID NO: 402968 - DNA, 20 bp, Artificial Sequence
  Description of Artificial Sequence: Synthetic oligonucleotide
  Target: LAMA2; (+) strand; PAM type: YTN; PAM sequence: TTA
aaatggcttctctcttagac

SEQ ID NO: 402969 - DNA, 20 bp, Artificial Sequence
  Description of Artificial Sequence: Synthetic oligonucleotide
  Target: LAMA2; (+) strand; PAM type: YTN; PAM sequence: CTT
ctctcttagacttggagttc

SEQ ID NO: 402970 - DNA, 20 bp, Artificial Sequence
  Description of Artificial Sequence: Synthetic oligonucleotide
  Target: LAMA2; (+) strand; PAM type: YTN; PAM sequence: TTC
tctcttagacttggagttct

SEQ ID NO: 402971 - DNA, 20 bp, Artificial Sequence
  Description of Artificial Sequence: Synthetic oligonucleotide
  Target: LAMA2; (+) strand; PAM type: YTN; PAM sequence: CTC
tcttagacttggagttctca

SEQ ID NO: 402972 - DNA, 20 bp, Artificial Sequence
  Description of Artificial Sequence: Synthetic oligonucleotide
  Target: LAMA2; (+) strand; PAM type: YTN; PAM sequence: CTC
ttagacttggagttctcaga

SEQ ID NO: 402973 - DNA, 20 bp, Artificial Sequence
  Description of Artificial Sequence: Synthetic oligonucleotide
  Target: LAMA2; (+) strand; PAM type: YTN; PAM sequence: CTT
agacttggagttctcagagc

SEQ ID NO: 402974 - DNA, 20 bp, Artificial Sequence
  Description of Artificial Sequence: Synthetic oligonucleotide
  Target: LAMA2; (+) strand; PAM type: YTN; PAM sequence: TTA
gacttggagttctcagagca

SEQ ID NO: 402975 - DNA, 20 bp, Artificial Sequence
  Description of Artificial Sequence: Synthetic oligonucleotide
  Target: LAMA2; (+) strand; PAM type: YTN; PAM sequence: CTT
ggagttctcagagcagttag

SEQ ID NO: 402976 - DNA, 20 bp, Artificial Sequence
  Description of Artificial Sequence: Synthetic oligonucleotide
  Target: LAMA2; (+) strand; PAM type: YTN; PAM sequence: TTG
gagttctcagagcagttaga

SEQ ID NO: 402977 - DNA, 20 bp, Artificial Sequence
  Description of Artificial Sequence: Synthetic oligonucleotide
  Target: LAMA2; (+) strand; PAM type: YTN; PAM sequence: TTC
tcagagcagttagattttag

SEQ ID NO: 402978 - DNA, 20 bp, Artificial Sequence
  Description of Artificial Sequence: Synthetic oligonucleotide
  Target: LAMA2; (+) strand; PAM type: YTN; PAM sequence: CTC
agagcagttagattttagtg

SEQ ID NO: 402979 - DNA, 20 bp, Artificial Sequence
  Description of Artificial Sequence: Synthetic oligonucleotide
  Target: LAMA2; (+) strand; PAM type: YTN; PAM sequence: TTA
gattttagtgctgctgctct

SEQ ID NO: 402980 - DNA, 20 bp, Artificial Sequence
  Description of Artificial Sequence: Synthetic oligonucleotide
  Target: LAMA2; (+) strand; PAM type: YTN; PAM sequence: TTT
tagtgctgctgctctgtctg

SEQ ID NO: 402981 - DNA, 20 bp, Artificial Sequence
  Description of Artificial Sequence: Synthetic oligonucleotide
  Target: LAMA2; (+) strand; PAM type: YTN; PAM sequence: TTT
agtgctgctgctctgtctgc

SEQ ID NO: 402982 - DNA, 20 bp, Artificial Sequence
  Description of Artificial Sequence: Synthetic oligonucleotide
  Target: LAMA2; (+) strand; PAM type: YTN; PAM sequence: TTA
gtgctgctgctctgtctgct

SEQ ID NO: 402983 - DNA, 20 bp, Artificial Sequence
  Description of Artificial Sequence: Synthetic oligonucleotide
  Target: LAMA2; (+) strand; PAM type: YTN; PAM sequence: CTG
ctgctctgtctgctacactt

SEQ ID NO: 402984 - DNA, 20 bp, Artificial Sequence
  Description of Artificial Sequence: Synthetic oligonucleotide
  Target: LAMA2; (+) strand; PAM type: YTN; PAM sequence: CTG
ctctgtctgctacacttttt

SEQ ID NO: 402985 - DNA, 20 bp, Artificial Sequence
  Description of Artificial Sequence: Synthetic oligonucleotide
  Target: LAMA2; (+) strand; PAM type: YTN; PAM sequence: CTC
tgtctgctacactttttttt

SEQ ID NO: 402986 - DNA, 20 bp, Artificial Sequence
  Description of Artificial Sequence: Synthetic oligonucleotide
  Target: LAMA2; (+) strand; PAM type: YTN; PAM sequence: CTG
tctgctacactttttttttt

SEQ ID NO: 402987 - DNA, 20 bp, Artificial Sequence
  Description of Artificial Sequence: Synthetic oligonucleotide
  Target: LAMA2; (+) strand; PAM type: YTN; PAM sequence: CTG
ctacactttttttttttttt

SEQ ID NO: 402988 - DNA, 20 bp, Artificial Sequence
  Description of Artificial Sequence: Synthetic oligonucleotide
  Target: LAMA2; (+) strand; PAM type: YTN; PAM sequence: CTA
cacttttttttttttttttt

SEQ ID NO: 402989 - DNA, 20 bp, Artificial Sequence
  Description of Artificial Sequence: Synthetic oligonucleotide
  Target: LAMA2; (+) strand; PAM type: YTN; PAM sequence: CTT
tttttttttttttttttttt

SEQ ID NO: 402990 - DNA, 20 bp, Artificial Sequence
  Description of Artificial Sequence: Synthetic oligonucleotide
  Target: LAMA2; (+) strand; PAM type: YTN; PAM sequence: TTT
tttttttttttttttttttg

SEQ ID NO: 402991 - DNA, 20 bp, Artificial Sequence
  Description of Artificial Sequence: Synthetic oligonucleotide
  Target: LAMA2; (+) strand; PAM type: YTN; PAM sequence: TTT
ttttttttttttttttttga

SEQ ID NO: 402992 - DNA, 20 bp, Artificial Sequence
  Description of Artificial Sequence: Synthetic oligonucleotide
  Target: LAMA2; (+) strand; PAM type: YTN; PAM sequence: TTT
tttttttttttttttttgag

SEQ ID NO: 402993 - DNA, 20 bp, Artificial Sequence
  Description of Artificial Sequence: Synthetic oligonucleotide
  Target: LAMA2; (+) strand; PAM type: YTN; PAM sequence: TTT
ttttttttttttttttgaga

SEQ ID NO: 402994 - DNA, 20 bp, Artificial Sequence
  Description of Artificial Sequence: Synthetic oligonucleotide
  Target: LAMA2; (+) strand; PAM type: YTN; PAM sequence: TTT
tttttttttttttttgagat

SEQ ID NO: 402995 - DNA, 20 bp, Artificial Sequence
  Description of Artificial Sequence: Synthetic oligonucleotide
  Target: LAMA2; (+) strand; PAM type: YTN; PAM sequence: TTT
ttttttttttttttgagatg

SEQ ID NO: 402996 - DNA, 20 bp, Artificial Sequence
  Description of Artificial Sequence: Synthetic oligonucleotide
  Target: LAMA2; (+) strand; PAM type: YTN; PAM sequence: TTT
tttttttttttttgagatgg

SEQ ID NO: 402997 - DNA, 20 bp, Artificial Sequence
  Description of Artificial Sequence: Synthetic oligonucleotide
  Target: LAMA2; (+) strand; PAM type: YTN; PAM sequence: TTT
ttttttttttttgagatgga

SEQ ID NO: 402998 - DNA, 20 bp, Artificial Sequence
  Description of Artificial Sequence: Synthetic oligonucleotide
  Target: LAMA2; (+) strand; PAM type: YTN; PAM sequence: TTT
tttttttttttgagatggaa

SEQ ID NO: 402999 - DNA, 20 bp, Artificial Sequence
  Description of Artificial Sequence: Synthetic oligonucleotide
  Target: LAMA2; (+) strand; PAM type: YTN; PAM sequence: TTT
ttttttttttgagatggaat

SEQ ID NO: 403000 - DNA, 20 bp, Artificial Sequence
  Description of Artificial Sequence: Synthetic oligonucleotide
  Target: LAMA2; (+) strand; PAM type: YTN; PAM sequence: TTT
tttttttttgagatggaatc

SEQ ID NO: 403001 - DNA, 20 bp, Artificial Sequence
  Description of Artificial Sequence: Synthetic oligonucleotide
  Target: LAMA2; (+) strand; PAM type: YTN; PAM sequence: TTT
ttttttttgagatggaatct

SEQ ID NO: 403002 - DNA, 20 bp, Artificial Sequence
  Description of Artificial Sequence: Synthetic oligonucleotide
  Target: LAMA2; (+) strand; PAM type: YTN; PAM sequence: TTT
tttttttgagatggaatctc

SEQ ID NO: 403003 - DNA, 20 bp, Artificial Sequence
  Description of Artificial Sequence: Synthetic oligonucleotide
  Target: LAMA2; (+) strand; PAM type: YTN; PAM sequence: TTT
ttttttgagatggaatctca

SEQ ID NO: 403004 - DNA, 20 bp, Artificial Sequence
  Description of Artificial Sequence: Synthetic oligonucleotide
  Target: LAMA2; (+) strand; PAM type: YTN; PAM sequence: TTT
tttttgagatggaatctcac

SEQ ID NO: 403005 - DNA, 20 bp, Artificial Sequence
  Description of Artificial Sequence: Synthetic oligonucleotide
  Target: LAMA2; (+) strand; PAM type: YTN; PAM sequence: TTT
ttttgagatggaatctcact

SEQ ID NO: 403006 - DNA, 20 bp, Artificial Sequence
  Description of Artificial Sequence: Synthetic oligonucleotide
  Target: LAMA2; (+) strand; PAM type: YTN; PAM sequence: TTT
tttgagatggaatctcactc

SEQ ID NO: 403007 - DNA, 20 bp, Artificial Sequence
  Description of Artificial Sequence: Synthetic oligonucleotide
  Target: LAMA2; (+) strand; PAM type: YTN; PAM sequence: TTT
ttgagatggaatctcactct

SEQ ID NO: 403008 - DNA, 20 bp, Artificial Sequence
  Description of Artificial Sequence: Synthetic oligonucleotide
  Target: LAMA2; (+) strand; PAM type: YTN; PAM sequence: TTT
tgagatggaatctcactctg

SEQ ID NO: 403009 - DNA, 20 bp, Artificial Sequence
  Description of Artificial Sequence: Synthetic oligonucleotide
  Target: LAMA2; (+) strand; PAM type: YTN; PAM sequence: TTT
gagatggaatctcactctgt

SEQ ID NO: 403010 - DNA, 20 bp, Artificial Sequence
  Description of Artificial Sequence: Synthetic oligonucleotide
  Target: LAMA2; (+) strand; PAM type: YTN; PAM sequence: TTG
agatggaatctcactctgtg

SEQ ID NO: 403011 - DNA, 20 bp, Artificial Sequence
  Description of Artificial Sequence: Synthetic oligonucleotide
  Target: LAMA2; (+) strand; PAM type: YTN; PAM sequence: CTC
actctgtggccaggctggag

SEQ ID NO: 403012 - DNA, 20 bp, Artificial Sequence
  Description of Artificial Sequence: Synthetic oligonucleotide
  Target: LAMA2; (+) strand; PAM type: YTN; PAM sequence: CTC
tgtggccaggctggagtgca

SEQ ID NO: 403013 - DNA, 20 bp, Artificial Sequence
  Description of Artificial Sequence: Synthetic oligonucleotide
  Target: LAMA2; (+) strand; PAM type: YTN; PAM sequence: CTG
tggccaggctggagtgcagt

SEQ ID NO: 403014 - DNA, 20 bp, Artificial Sequence
  Description of Artificial Sequence: Synthetic oligonucleotide
  Target: LAMA2; (+) strand; PAM type: YTN; PAM sequence: CTG
gagtgcagtggagcaatctc

SEQ ID NO: 403015 - DNA, 20 bp, Artificial Sequence
  Description of Artificial Sequence: Synthetic oligonucleotide
  Target: LAMA2; (+) strand; PAM type: YTN; PAM sequence: CTC
agctcactgcagcctccgcc

SEQ ID NO: 403016 - DNA, 20 bp, Artificial Sequence
  Description of Artificial Sequence: Synthetic oligonucleotide
  Target: LAMA2; (+) strand; PAM type: YTN; PAM sequence: CTC
actgcagcctccgcctccca

SEQ ID NO: 403017 - DNA, 20 bp, Artificial Sequence
  Description of Artificial Sequence: Synthetic oligonucleotide
  Target: LAMA2; (+) strand; PAM type: YTN; PAM sequence: CTG
cagcctccgcctcccaggtt

SEQ ID NO: 403018 - DNA, 20 bp, Artificial Sequence
  Description of Artificial Sequence: Synthetic oligonucleotide
  Target: LAMA2; (+) strand; PAM type: YTN; PAM sequence: CTC
cgcctcccaggttcaagcaa

SEQ ID NO: 403019 - DNA, 20 bp, Artificial Sequence
  Description of Artificial Sequence: Synthetic oligonucleotide
  Target: LAMA2; (+) strand; PAM type: YTN; PAM sequence: CTC
ccaggttcaagcaattctcc

SEQ ID NO: 403020 - DNA, 20 bp, Artificial Sequence
  Description of Artificial Sequence: Synthetic oligonucleotide
  Target: LAMA2; (+) strand; PAM type: YTN; PAM sequence: TTC
aagcaattctcctgcctcag

SEQ ID NO: 403021 - DNA, 20 bp, Artificial Sequence
  Description of Artificial Sequence: Synthetic oligonucleotide
  Target: LAMA2; (+) strand; PAM type: YTN; PAM sequence: TTC
tcctgcctcagcctcctgag

SEQ ID NO: 403022 - DNA, 20 bp, Artificial Sequence
  Description of Artificial Sequence: Synthetic oligonucleotide
  Target: LAMA2; (+) strand; PAM type: YTN; PAM sequence: CTC
ctgcctcagcctcctgagta

SEQ ID NO: 403023 - DNA, 20 bp, Artificial Sequence
  Description of Artificial Sequence: Synthetic oligonucleotide
  Target: LAMA2; (+) strand; PAM type: YTN; PAM sequence: CTG
cctcagcctcctgagtagct

SEQ ID NO: 403024 - DNA, 20 bp, Artificial Sequence
  Description of Artificial Sequence: Synthetic oligonucleotide
  Target: LAMA2; (+) strand; PAM type: YTN; PAM sequence: CTC
agcctcctgagtagctggga

SEQ ID NO: 403025 - DNA, 20 bp, Artificial Sequence
  Description of Artificial Sequence: Synthetic oligonucleotide
  Target: LAMA2; (+) strand; PAM type: YTN; PAM sequence: CTC
ctgagtagctgggactacag

SEQ ID NO: 403026 - DNA, 20 bp, Artificial Sequence
  Description of Artificial Sequence: Synthetic oligonucleotide
  Target: LAMA2; (+) strand; PAM type: YTN; PAM sequence: CTG
agtagctgggactacaggca

SEQ ID NO: 403027 - DNA, 20 bp, Artificial Sequence
  Description of Artificial Sequence: Synthetic oligonucleotide
  Target: LAMA2; (+) strand; PAM type: YTN; PAM sequence: CTG
ggactacaggcacatgtcac

SEQ ID NO: 403028 - DNA, 20 bp, Artificial Sequence
  Description of Artificial Sequence: Synthetic oligonucleotide
  Target: LAMA2; (+) strand; PAM type: YTN; PAM sequence: CTA
caggcacatgtcaccacgcc

SEQ ID NO: 403029 - DNA, 20 bp, Artificial Sequence
  Description of Artificial Sequence: Synthetic oligonucleotide
  Target: LAMA2; (+) strand; PAM type: YTN; PAM sequence: CTA
attgtttttgtatttttagt

SEQ ID NO: 403030 - DNA, 20 bp, Artificial Sequence
  Description of Artificial Sequence: Synthetic oligonucleotide
  Target: LAMA2; (+) strand; PAM type: YTN; PAM sequence: TTG
tttttgtatttttagttgat

SEQ ID NO: 403031 - DNA, 20 bp, Artificial Sequence
  Description of Artificial Sequence: Synthetic oligonucleotide
  Target: LAMA2; (+) strand; PAM type: YTN; PAM sequence: TTT
ttgtatttttagttgataca

SEQ ID NO: 403032 - DNA, 20 bp, Artificial Sequence
  Description of Artificial Sequence: Synthetic oligonucleotide
  Target: LAMA2; (+) strand; PAM type: YTN; PAM sequence: TTT
tgtatttttagttgatacag

SEQ ID NO: 403033 - DNA, 20 bp, Artificial Sequence
  Description of Artificial Sequence: Synthetic oligonucleotide
  Target: LAMA2; (+) strand; PAM type: YTN; PAM sequence: TTT
gtatttttagttgatacagg

SEQ ID NO: 403034 - DNA, 20 bp, Artificial Sequence
  Description of Artificial Sequence: Synthetic oligonucleotide
  Target: LAMA2; (+) strand; PAM type: YTN; PAM sequence: TTG
tatttttagttgatacaggg

SEQ ID NO: 403035 - DNA, 20 bp, Artificial Sequence
  Description of Artificial Sequence: Synthetic oligonucleotide
  Target: LAMA2; (+) strand; PAM type: YTN; PAM sequence: TTT
ttagttgatacagggcttca

SEQ ID NO: 403036 - DNA, 20 bp, Artificial Sequence
  Description of Artificial Sequence: Synthetic oligonucleotide
  Target: LAMA2; (+) strand; PAM type: YTN; PAM sequence: TTT
tagttgatacagggcttcac

SEQ ID NO: 403037 - DNA, 20 bp, Artificial Sequence
  Description of Artificial Sequence: Synthetic oligonucleotide
  Target: LAMA2; (+) strand; PAM type: YTN; PAM sequence: TTT
agttgatacagggcttcacc

SEQ ID NO: 403038 - DNA, 20 bp, Artificial Sequence
  Description of Artificial Sequence: Synthetic oligonucleotide
  Target: LAMA2; (+) strand; PAM type: YTN; PAM sequence: TTA
gttgatacagggcttcacca

SEQ ID NO: 403039 - DNA, 20 bp, Artificial Sequence
  Description of Artificial Sequence: Synthetic oligonucleotide
  Target: LAMA2; (+) strand; PAM type: YTN; PAM sequence: TTG
atacagggcttcaccatgtt

SEQ ID NO: 403040 - DNA, 20 bp, Artificial Sequence
  Description of Artificial Sequence: Synthetic oligonucleotide
  Target: LAMA2; (+) strand; PAM type: YTN; PAM sequence: CTT
caccatgttggccaggattg

SEQ ID NO: 403041 - DNA, 20 bp, Artificial Sequence
  Description of Artificial Sequence: Synthetic oligonucleotide
  Target: LAMA2; (+) strand; PAM type: YTN; PAM sequence: TTC
accatgttggccaggattgt

SEQ ID NO: 403042 - DNA, 20 bp, Artificial Sequence
  Description of Artificial Sequence: Synthetic oligonucleotide
  Target: LAMA2; (+) strand; PAM type: YTN; PAM sequence: TTG
gccaggattgtctcaatctc

SEQ ID NO: 403043 - DNA, 20 bp, Artificial Sequence
  Description of Artificial Sequence: Synthetic oligonucleotide
  Target: LAMA2; (+) strand; PAM type: YTN; PAM sequence: TTG
tctcaatctcttgacctcgt

SEQ ID NO: 403044 - DNA, 20 bp, Artificial Sequence
  Description of Artificial Sequence: Synthetic oligonucleotide
  Target: LAMA2; (+) strand; PAM type: YTN; PAM sequence: CTC
aatctcttgacctcgtgatc

SEQ ID NO: 403045 - DNA, 20 bp, Artificial Sequence
  Description of Artificial Sequence: Synthetic oligonucleotide
  Target: LAMA2; (+) strand; PAM type: YTN; PAM sequence: CTC
ttgacctcgtgatccgcctg

SEQ ID NO: 403046 - DNA, 20 bp, Artificial Sequence
  Description of Artificial Sequence: Synthetic oligonucleotide
  Target: LAMA2; (+) strand; PAM type: YTN; PAM sequence: CTT
gacctcgtgatccgcctgcc

SEQ ID NO: 403047 - DNA, 20 bp, Artificial Sequence
  Description of Artificial Sequence: Synthetic oligonucleotide
  Target: LAMA2; (+) strand; PAM type: YTN; PAM sequence: TTG
acctcgtgatccgcctgcct

SEQ ID NO: 403048 - DNA, 20 bp, Artificial Sequence
  Description of Artificial Sequence: Synthetic oligonucleotide
  Target: LAMA2; (+) strand; PAM type: YTN; PAM sequence: CTC
gtgatccgcctgccttggcc

SEQ ID NO: 403049 - DNA, 20 bp, Artificial Sequence
  Description of Artificial Sequence: Synthetic oligonucleotide
  Target: LAMA2; (+) strand; PAM type: YTN; PAM sequence: CTG
ccttggcctcccaaagttct

SEQ ID NO: 403050 - DNA, 20 bp, Artificial Sequence
  Description of Artificial Sequence: Synthetic oligonucleotide
  Target: LAMA2; (+) strand; PAM type: YTN; PAM sequence: CTT
ggcctcccaaagttctggga

SEQ ID NO: 403051 - DNA, 20 bp, Artificial Sequence
  Description of Artificial Sequence: Synthetic oligonucleotide
  Target: LAMA2; (+) strand; PAM type: YTN; PAM sequence: TTG
gcctcccaaagttctgggat

SEQ ID NO: 403052 - DNA, 20 bp, Artificial Sequence
  Description of Artificial Sequence: Synthetic oligonucleotide
  Target: LAMA2; (+) strand; PAM type: YTN; PAM sequence: CTC
ccaaagttctgggattacag

SEQ ID NO: 403053 - DNA, 20 bp, Artificial Sequence
  Description of Artificial Sequence: Synthetic oligonucleotide
  Target: LAMA2; (+) strand; PAM type: YTN; PAM sequence: TTC
tgggattacaggcgtgagcc

SEQ ID NO: 403054 - DNA, 20 bp, Artificial Sequence
  Description of Artificial Sequence: Synthetic oligonucleotide
  Target: LAMA2; (+) strand; PAM type: YTN; PAM sequence: CTG
ggattacaggcgtgagccac

SEQ ID NO: 403055 - DNA, 20 bp, Artificial Sequence
  Description of Artificial Sequence: Synthetic oligonucleotide
  Target: LAMA2; (+) strand; PAM type: YTN; PAM sequence: TTA
caggcgtgagccactgcacc

SEQ ID NO: 403056 - DNA, 20 bp, Artificial Sequence
  Description of Artificial Sequence: Synthetic oligonucleotide
  Target: LAMA2; (+) strand; PAM type: YTN; PAM sequence: CTG
cacccggctctgtctgttac

SEQ ID NO: 403057 - DNA, 20 bp, Artificial Sequence
  Description of Artificial Sequence: Synthetic oligonucleotide
  Target: LAMA2; (+) strand; PAM type: YTN; PAM sequence: CTC
tgtctgttacactttggcaa

SEQ ID NO: 403058 - DNA, 20 bp, Artificial Sequence
  Description of Artificial Sequence: Synthetic oligonucleotide
  Target: LAMA2; (+) strand; PAM type: YTN; PAM sequence: CTG
tctgttacactttggcaacc

SEQ ID NO: 403059 - DNA, 20 bp, Artificial Sequence
  Description of Artificial Sequence: Synthetic oligonucleotide
  Target: LAMA2; (+) strand; PAM type: YTN; PAM sequence: CTG
ttacactttggcaaccccct

SEQ ID NO: 403060 - DNA, 20 bp, Artificial Sequence
  Description of Artificial Sequence: Synthetic oligonucleotide
  Target: LAMA2; (+) strand; PAM type: YTN; PAM sequence: TTA
cactttggcaaccccctttt

SEQ ID NO: 403061 - DNA, 20 bp, Artificial Sequence
  Description of Artificial Sequence: Synthetic oligonucleotide
  Target: LAMA2; (+) strand; PAM type: YTN; PAM sequence: CTT
tggcaacccccttttcaaca

SEQ ID NO: 403062 - DNA, 20 bp, Artificial Sequence
  Description of Artificial Sequence: Synthetic oligonucleotide
  Target: LAMA2; (+) strand; PAM type: YTN; PAM sequence: TTT
ggcaacccccttttcaacac

SEQ ID NO: 403063 - DNA, 20 bp, Artificial Sequence
  Description of Artificial Sequence: Synthetic oligonucleotide
  Target: LAMA2; (+) strand; PAM type: YTN; PAM sequence: TTG
gcaacccccttttcaacaca

SEQ ID NO: 403064 - DNA, 20 bp, Artificial Sequence
  Description of Artificial Sequence: Synthetic oligonucleotide
  Target: LAMA2; (+) strand; PAM type: YTN; PAM sequence: CTT
ttcaacacactaatcatgga

SEQ ID NO: 403065 - DNA, 20 bp, Artificial Sequence
  Description of Artificial Sequence: Synthetic oligonucleotide
  Target: LAMA2; (+) strand; PAM type: YTN; PAM sequence: TTT
tcaacacactaatcatggaa

SEQ ID NO: 403066 - DNA, 20 bp, Artificial Sequence
  Description of Artificial Sequence: Synthetic oligonucleotide
  Target: LAMA2; (+) strand; PAM type: YTN; PAM sequence: TTT
caacacactaatcatggaat

SEQ ID NO: 403067 - DNA, 20 bp, Artificial Sequence
  Description of Artificial Sequence: Synthetic oligonucleotide
  Target: LAMA2; (+) strand; PAM type: YTN; PAM sequence: TTC
aacacactaatcatggaatc

SEQ ID NO: 403068 - DNA, 20 bp, Artificial Sequence
  Description of Artificial Sequence: Synthetic oligonucleotide
  Target: LAMA2; (+) strand; PAM type: YTN; PAM sequence: CTA
atcatggaatcccgtttttt

SEQ ID NO: 403069 - DNA, 20 bp, Artificial Sequence
  Description of Artificial Sequence: Synthetic oligonucleotide
  Target: LAMA2; (+) strand; PAM type: YTN; PAM sequence: TTT
ttttttttttaccaggctta

SEQ ID NO: 403070 - DNA, 20 bp, Artificial Sequence
  Description of Artificial Sequence: Synthetic oligonucleotide
  Target: LAMA2; (+) strand; PAM type: YTN; PAM sequence: TTT
tttttttttaccaggcttac

SEQ ID NO: 403071 - DNA, 20 bp, Artificial Sequence
  Description of Artificial Sequence: Synthetic oligonucleotide
  Target: LAMA2; (+) strand; PAM type: YTN; PAM sequence: TTT
ttttttttaccaggcttacc

SEQ ID NO: 403072 - DNA, 20 bp, Artificial Sequence
  Description of Artificial Sequence: Synthetic oligonucleotide
  Target: LAMA2; (+) strand; PAM type: YTN; PAM sequence: TTT
tttttttaccaggcttacct

SEQ ID NO: 403073 - DNA, 20 bp, Artificial Sequence
  Description of Artificial Sequence: Synthetic oligonucleotide
  Target: LAMA2; (+) strand; PAM type: YTN; PAM sequence: TTT
ttttttaccaggcttaccta

SEQ ID NO: 403074 - DNA, 20 bp, Artificial Sequence
  Description of Artificial Sequence: Synthetic oligonucleotide
  Target: LAMA2; (+) strand; PAM type: YTN; PAM sequence: TTT
tttttaccaggcttacctaa

SEQ ID NO: 403075 - DNA, 20 bp, Artificial Sequence
  Description of Artificial Sequence: Synthetic oligonucleotide
  Target: LAMA2; (+) strand; PAM type: YTN; PAM sequence: TTT
ttttaccaggcttacctaag

SEQ ID NO: 403076 - DNA, 20 bp, Artificial Sequence
  Description of Artificial Sequence: Synthetic oligonucleotide
  Target: LAMA2; (+) strand; PAM type: YTN; PAM sequence: TTT
tttaccaggcttacctaagc

SEQ ID NO: 403077 - DNA, 20 bp, Artificial Sequence
  Description of Artificial Sequence: Synthetic oligonucleotide
  Target: LAMA2; (+) strand; PAM type: YTN; PAM sequence: TTT
ttaccaggcttacctaagca

SEQ ID NO: 403078 - DNA, 20 bp, Artificial Sequence
  Description of Artificial Sequence: Synthetic oligonucleotide
  Target: LAMA2; (+) strand; PAM type: YTN; PAM sequence: TTT
taccaggcttacctaagcaa

SEQ ID NO: 403079 - DNA, 20 bp, Artificial Sequence
  Description of Artificial Sequence: Synthetic oligonucleotide
  Target: LAMA2; (+) strand; PAM type: YTN; PAM sequence: TTT
accaggcttacctaagcaat

SEQ ID NO: 403080 - DNA, 20 bp, Artificial Sequence
  Description of Artificial Sequence: Synthetic oligonucleotide
  Target: LAMA2; (+) strand; PAM type: YTN; PAM sequence: TTA
ccaggcttacctaagcaatg

SEQ ID NO: 403081 - DNA, 20 bp, Artificial Sequence
  Description of Artificial Sequence: Synthetic oligonucleotide
  Target: LAMA2; (+) strand; PAM type: YTN; PAM sequence: CTT
acctaagcaatgactgaaat

SEQ ID NO: 403082 - DNA, 20 bp, Artificial Sequence
  Description of Artificial Sequence: Synthetic oligonucleotide
  Target: LAMA2; (+) strand; PAM type: YTN; PAM sequence: TTA
cctaagcaatgactgaaatt

SEQ ID NO: 403083 - DNA, 20 bp, Artificial Sequence
  Description of Artificial Sequence: Synthetic oligonucleotide
  Target: LAMA2; (+) strand; PAM type: YTN; PAM sequence: CTA
agcaatgactgaaattcatt

SEQ ID NO: 403084 - DNA, 20 bp, Artificial Sequence
  Description of Artificial Sequence: Synthetic oligonucleotide
  Target: LAMA2; (+) strand; PAM type: YTN; PAM sequence: CTG
aaattcattctgtgaccaaa

SEQ ID NO: 403085 - DNA, 20 bp, Artificial Sequence
  Description of Artificial Sequence: Synthetic oligonucleotide
  Target: LAMA2; (+) strand; PAM type: YTN; PAM sequence: TTC
attctgtgaccaaatgatca

SEQ ID NO: 403086 - DNA, 20 bp, Artificial Sequence
  Description of Artificial Sequence: Synthetic oligonucleotide
  Target: LAMA2; (+) strand; PAM type: YTN; PAM sequence: TTC
tgtgaccaaatgatcacata

SEQ ID NO: 403087 - DNA, 20 bp, Artificial Sequence
  Description of Artificial Sequence: Synthetic oligonucleotide
  Target: LAMA2; (+) strand; PAM type: YTN; PAM sequence: CTG
tgaccaaatgatcacatatt

SEQ ID NO: 403088 - DNA, 20 bp, Artificial Sequence
  Description of Artificial Sequence: Synthetic oligonucleotide
  Target: LAMA2; (+) strand; PAM type: YTN; PAM sequence: TTA
catttatattgagtcatctc

SEQ ID NO: 403089 - DNA, 20 bp, Artificial Sequence
  Description of Artificial Sequence: Synthetic oligonucleotide
  Target: LAMA2; (+) strand; PAM type: YTN; PAM sequence: TTT
atattgagtcatctcttctc

SEQ ID NO: 403090 - DNA, 20 bp, Artificial Sequence
  Description of Artificial Sequence: Synthetic oligonucleotide
  Target: LAMA2; (+) strand; PAM type: YTN; PAM sequence: TTA
tattgagtcatctcttctct

SEQ ID NO: 403091 - DNA, 20 bp, Artificial Sequence
  Description of Artificial Sequence: Synthetic oligonucleotide
  Target: LAMA2; (+) strand; PAM type: YTN; PAM sequence: TTG
agtcatctcttctctaaata

SEQ ID NO: 403092 - DNA, 20 bp, Artificial Sequence
  Description of Artificial Sequence: Synthetic oligonucleotide
  Target: LAMA2; (+) strand; PAM type: YTN; PAM sequence: CTC
ttctctaaataataactgag

SEQ ID NO: 403093 - DNA, 20 bp, Artificial Sequence
  Description of Artificial Sequence: Synthetic oligonucleotide
  Target: LAMA2; (+) strand; PAM type: YTN; PAM sequence: CTT
ctctaaataataactgaggg

SEQ ID NO: 403094 - DNA, 20 bp, Artificial Sequence
  Description of Artificial Sequence: Synthetic oligonucleotide
  Target: LAMA2; (+) strand; PAM type: YTN; PAM sequence: TTC
tctaaataataactgaggga

SEQ ID NO: 403095 - DNA, 20 bp, Artificial Sequence
  Description of Artificial Sequence: Synthetic oligonucleotide
  Target: LAMA2; (+) strand; PAM type: YTN; PAM sequence: CTC
taaataataactgagggata

SEQ ID NO: 403096 - DNA, 20 bp, Artificial Sequence
  Description of Artificial Sequence: Synthetic oligonucleotide
  Target: LAMA2; (+) strand; PAM type: YTN; PAM sequence: CTA
aataataactgagggatatt

SEQ ID NO: 403097 - DNA, 20 bp, Artificial Sequence
  Description of Artificial Sequence: Synthetic oligonucleotide
  Target: LAMA2; (+) strand; PAM type: YTN; PAM sequence: CTG
agggatattattcaattgtg

SEQ ID NO: 403098 - DNA, 20 bp, Artificial Sequence
  Description of Artificial Sequence: Synthetic oligonucleotide
  Target: LAMA2; (+) strand; PAM type: YTN; PAM sequence: TTA
ttcaattgtgttgtttgttt

SEQ ID NO: 403099 - DNA, 20 bp, Artificial Sequence
  Description of Artificial Sequence: Synthetic oligonucleotide
  Target: LAMA2; (+) strand; PAM type: YTN; PAM sequence: TTC
aattgtgttgtttgttttgt

SEQ ID NO: 403100 - DNA, 20 bp, Artificial Sequence
  Description of Artificial Sequence: Synthetic oligonucleotide
  Target: LAMA2; (+) strand; PAM type: YTN; PAM sequence: TTG
tgttgtttgttttgttttgt

SEQ ID NO: 403101 - DNA, 20 bp, Artificial Sequence
  Description of Artificial Sequence: Synthetic oligonucleotide
  Target: LAMA2; (+) strand; PAM type: YTN; PAM sequence: TTG
tttgttttgttttgttttgt

SEQ ID NO: 403102 - DNA, 20 bp, Artificial Sequence
  Description of Artificial Sequence: Synthetic oligonucleotide
  Target: LAMA2; (+) strand; PAM type: YTN; PAM sequence: TTT
gttttgttttgttttgtttt

SEQ ID NO: 403103 - DNA, 20 bp, Artificial Sequence
  Description of Artificial Sequence: Synthetic oligonucleotide
  Target: LAMA2; (+) strand; PAM type: YTN; PAM sequence: TTG
ttttgttttgttttgttttg

SEQ ID NO: 403104 - DNA, 20 bp, Artificial Sequence
  Description of Artificial Sequence: Synthetic oligonucleotide
  Target: LAMA2; (+) strand; PAM type: YTN; PAM sequence: TTT
tgttttgttttgttttgttt

SEQ ID NO: 403105 - DNA, 20 bp, Artificial Sequence
  Description of Artificial Sequence: Synthetic oligonucleotide
  Target: LAMA2; (+) strand; PAM type: YTN; PAM sequence: TTT
gttttgttttgttttgtttt

SEQ ID NO: 403106 - DNA, 20 bp, Artificial Sequence
  Description of Artificial Sequence: Synthetic oligonucleotide
  Target: LAMA2; (+) strand; PAM type: YTN; PAM sequence: TTG
ttttgttttgttttgttttg

SEQ ID NO: 403107 - DNA, 20 bp, Artificial Sequence
  Description of Artificial Sequence: Synthetic oligonucleotide
  Target: LAMA2; (+) strand; PAM type: YTN; PAM sequence: TTT
tgttttgttttgttttgttt

SEQ ID NO: 403108 - DNA, 20 bp, Artificial Sequence
  Description of Artificial Sequence: Synthetic oligonucleotide
  Target: LAMA2; (+) strand; PAM type: YTN; PAM sequence: TTT
gttttgttttgttttgtttt

SEQ ID NO: 403109 - DNA, 20 bp, Artificial Sequence
  Description of Artificial Sequence: Synthetic oligonucleotide
  Target: LAMA2; (+) strand; PAM type: YTN; PAM sequence: TTG
ttttgttttgttttgttttg

SEQ ID NO: 403110 - DNA, 20 bp, Artificial Sequence
  Description of Artificial Sequence: Synthetic oligonucleotide
  Target: LAMA2; (+) strand; PAM type: YTN; PAM sequence: TTT
tgttttgttttgttttgttt

SEQ ID NO: 403111 - DNA, 20 bp, Artificial Sequence
  Description of Artificial Sequence: Synthetic oligonucleotide
  Target: LAMA2; (+) strand; PAM type: YTN; PAM sequence: TTT
gttttgttttgttttgtttt

SEQ ID NO: 403112 - DNA, 20 bp, Artificial Sequence
  Description of Artificial Sequence: Synthetic oligonucleotide
  Target: LAMA2; (+) strand; PAM type: YTN; PAM sequence: TTG
ttttgttttgttttgttttg

SEQ ID NO: 403113 - DNA, 20 bp, Artificial Sequence
  Description of Artificial Sequence: Synthetic oligonucleotide
  Target: LAMA2; (+) strand; PAM type: YTN; PAM sequence: TTT
tgttttgttttgttttgttt

SEQ ID NO: 403114 - DNA, 20 bp, Artificial Sequence
  Description of Artificial Sequence: Synthetic oligonucleotide
  Target: LAMA2; (+) strand; PAM type: YTN; PAM sequence: TTT
gttttgttttgttttgtttt

SEQ ID NO: 403115 - DNA, 20 bp, Artificial Sequence
  Description of Artificial Sequence: Synthetic oligonucleotide
  Target: LAMA2; (+) strand; PAM type: YTN; PAM sequence: TTG
ttttgttttgttttgttttg

SEQ ID NO: 403116 - DNA, 20 bp, Artificial Sequence
  Description of Artificial Sequence: Synthetic oligonucleotide
  Target: LAMA2; (+) strand; PAM type: YTN; PAM sequence: TTT
tgttttgttttgttttgttt

SEQ ID NO: 403117 - DNA, 20 bp, Artificial Sequence
  Description of Artificial Sequence: Synthetic oligonucleotide
  Target: LAMA2; (+) strand; PAM type: YTN; PAM sequence: TTT
gttttgttttgttttgtttt

SEQ ID NO: 403118 - DNA, 20 bp, Artificial Sequence
  Description of Artificial Sequence: Synthetic oligonucleotide
  Target: LAMA2; (+) strand; PAM type: YTN; PAM sequence: TTG
ttttgttttgttttgttttg

SEQ ID NO: 403119 - DNA, 20 bp, Artificial Sequence
  Description of Artificial Sequence: Synthetic oligonucleotide
  Target: LAMA2; (+) strand; PAM type: YTN; PAM sequence: TTT
tgttttgttttgttttgaca

SEQ ID NO: 403120 - DNA, 20 bp, Artificial Sequence
  Description of Artificial Sequence: Synthetic oligonucleotide
  Target: LAMA2; (+) strand; PAM type: YTN; PAM sequence: TTT
gttttgttttgttttgacat

SEQ ID NO: 403121 - DNA, 20 bp, Artificial Sequence
  Description of Artificial Sequence: Synthetic oligonucleotide
  Target: LAMA2; (+) strand; PAM type: YTN; PAM sequence: TTG
ttttgttttgttttgacatg

SEQ ID NO: 403122 - DNA, 20 bp, Artificial Sequence
  Description of Artificial Sequence: Synthetic oligonucleotide
  Target: LAMA2; (+) strand; PAM type: YTN; PAM sequence: TTT
tgttttgttttgacatggag

SEQ ID NO: 403123 - DNA, 20 bp, Artificial Sequence
  Description of Artificial Sequence: Synthetic oligonucleotide
  Target: LAMA2; (+) strand; PAM type: YTN; PAM sequence: TTT
gttttgttttgacatggagt

SEQ ID NO: 403124 - DNA, 20 bp, Artificial Sequence
  Description of Artificial Sequence: Synthetic oligonucleotide
  Target: LAMA2; (+) strand; PAM type: YTN; PAM sequence: TTG
ttttgttttgacatggagtc

SEQ ID NO: 403125 - DNA, 20 bp, Artificial Sequence
  Description of Artificial Sequence: Synthetic oligonucleotide
  Target: LAMA2; (+) strand; PAM type: YTN; PAM sequence: TTT
tgttttgacatggagtctca

SEQ ID NO: 403126 - DNA, 20 bp, Artificial Sequence
  Description of Artificial Sequence: Synthetic oligonucleotide
  Target: LAMA2; (+) strand; PAM type: YTN; PAM sequence: TTT
gttttgacatggagtctcac

SEQ ID NO: 403127 - DNA, 20 bp, Artificial Sequence
  Description of Artificial Sequence: Synthetic oligonucleotide
  Target: LAMA2; (+) strand; PAM type: YTN; PAM sequence: TTG
ttttgacatggagtctcact

SEQ ID NO: 403128 - DNA, 20 bp, Artificial Sequence
  Description of Artificial Sequence: Synthetic oligonucleotide
  Target: LAMA2; (+) strand; PAM type: YTN; PAM sequence: TTT
tgacatggagtctcactttg

SEQ ID NO: 403129 - DNA, 20 bp, Artificial Sequence
  Description of Artificial Sequence: Synthetic oligonucleotide
  Target: LAMA2; (+) strand; PAM type: YTN; PAM sequence: TTT
gacatggagtctcactttgt

SEQ ID NO: 403130 - DNA, 20 bp, Artificial Sequence
  Description of Artificial Sequence: Synthetic oligonucleotide
  Target: LAMA2; (+) strand; PAM type: YTN; PAM sequence: TTG
acatggagtctcactttgtc

SEQ ID NO: 403131 - DNA, 20 bp, Artificial Sequence
  Description of Artificial Sequence: Synthetic oligonucleotide
  Target: LAMA2; (+) strand; PAM type: YTN; PAM sequence: CTC
actttgtcacccaggctgga

SEQ ID NO: 403132 - DNA, 20 bp, Artificial Sequence
  Description of Artificial Sequence: Synthetic oligonucleotide
  Target: LAMA2; (+) strand; PAM type: YTN; PAM sequence: CTT
tgtcacccaggctggagtac

SEQ ID NO: 403133 - DNA, 20 bp, Artificial Sequence
  Description of Artificial Sequence: Synthetic oligonucleotide
  Target: LAMA2; (+) strand; PAM type: YTN; PAM sequence: TTT
gtcacccaggctggagtaca

SEQ ID NO: 403134 - DNA, 20 bp, Artificial Sequence
  Description of Artificial Sequence: Synthetic oligonucleotide
  Target: LAMA2; (+) strand; PAM type: YTN; PAM sequence: TTG
tcacccaggctggagtacag

SEQ ID NO: 403135 - DNA, 20 bp, Artificial Sequence
  Description of Artificial Sequence: Synthetic oligonucleotide
  Target: LAMA2; (+) strand; PAM type: YTN; PAM sequence: CTG
gagtacagtggcacgatctc

SEQ ID NO: 403136 - DNA, 20 bp, Artificial Sequence
  Description of Artificial Sequence: Synthetic oligonucleotide
  Target: LAMA2; (+) strand; PAM type: YTN; PAM sequence: CTC
agctcactgcaacctctgcc

SEQ ID NO: 403137 - DNA, 20 bp, Artificial Sequence
  Description of Artificial Sequence: Synthetic oligonucleotide
  Target: LAMA2; (+) strand; PAM type: YTN; PAM sequence: CTC
actgcaacctctgcctcttg

SEQ ID NO: 403138 - DNA, 20 bp, Artificial Sequence
  Description of Artificial Sequence: Synthetic oligonucleotide
  Target: LAMA2; (+) strand; PAM type: YTN; PAM sequence: CTG
caacctctgcctcttgggtt

SEQ ID NO: 403139 - DNA, 20 bp, Artificial Sequence
  Description of Artificial Sequence: Synthetic oligonucleotide
  Target: LAMA2; (+) strand; PAM type: YTN; PAM sequence: CTC
tgcctcttgggttcaagcaa

SEQ ID NO: 403140 - DNA, 20 bp, Artificial Sequence
  Description of Artificial Sequence: Synthetic oligonucleotide
  Target: LAMA2; (+) strand; PAM type: YTN; PAM sequence: CTG
cctcttgggttcaagcaatt

SEQ ID NO: 403141 - DNA, 20 bp, Artificial Sequence
  Description of Artificial Sequence: Synthetic oligonucleotide
  Target: LAMA2; (+) strand; PAM type: YTN; PAM sequence: CTC
ttgggttcaagcaattctcc

SEQ ID NO: 403142 - DNA, 20 bp, Artificial Sequence
  Description of Artificial Sequence: Synthetic oligonucleotide
  Target: LAMA2; (+) strand; PAM type: YTN; PAM sequence: CTT
gggttcaagcaattctcctg

SEQ ID NO: 403143 - DNA, 20 bp, Artificial Sequence
  Description of Artificial Sequence: Synthetic oligonucleotide
  Target: LAMA2; (+) strand; PAM type: YTN; PAM sequence: TTG
ggttcaagcaattctcctga

SEQ ID NO: 403144 - DNA, 20 bp, Artificial Sequence
  Description of Artificial Sequence: Synthetic oligonucleotide
  Target: LAMA2; (+) strand; PAM type: YTN; PAM sequence: TTC
aagcaattctcctgactcag

SEQ ID NO: 403145 - DNA, 20 bp, Artificial Sequence
  Description of Artificial Sequence: Synthetic oligonucleotide
  Target: LAMA2; (+) strand; PAM type: YTN; PAM sequence: TTC
tcctgactcagcctcctgag

SEQ ID NO: 403146 - DNA, 20 bp, Artificial Sequence
  Description of Artificial Sequence: Synthetic oligonucleotide
  Target: LAMA2; (+) strand; PAM type: YTN; PAM sequence: CTC
ctgactcagcctcctgagta

SEQ ID NO: 403147 - DNA, 20 bp, Artificial Sequence
  Description of Artificial Sequence: Synthetic oligonucleotide
  Target: LAMA2; (+) strand; PAM type: YTN; PAM sequence: CTG
actcagcctcctgagtagct

SEQ ID NO: 403148 - DNA, 20 bp, Artificial Sequence
  Description of Artificial Sequence: Synthetic oligonucleotide
  Target: LAMA2; (+) strand; PAM type: YTN; PAM sequence: CTC
agcctcctgagtagctggga

SEQ ID NO: 403149 - DNA, 20 bp, Artificial Sequence
  Description of Artificial Sequence: Synthetic oligonucleotide
  Target: LAMA2; (+) strand; PAM type: YTN; PAM sequence: CTC
ctgagtagctgggactacag

SEQ ID NO: 403150 - DNA, 20 bp, Artificial Sequence
  Description of Artificial Sequence: Synthetic oligonucleotide
  Target: LAMA2; (+) strand; PAM type: YTN; PAM sequence: CTG
agtagctgggactacaggca

SEQ ID NO: 403151 - DNA, 20 bp, Artificial Sequence
  Description of Artificial Sequence: Synthetic oligonucleotide
  Target: LAMA2; (+) strand; PAM type: YTN; PAM sequence: CTG
ggactacaggcacatgccac

SEQ ID NO: 403152 - DNA, 20 bp, Artificial Sequence
  Description of Artificial Sequence: Synthetic oligonucleotide
  Target: LAMA2; (+) strand; PAM type: YTN; PAM sequence: CTA
caggcacatgccaccaccat

SEQ ID NO: 403153 - DNA, 20 bp, Artificial Sequence
  Description of Artificial Sequence: Synthetic oligonucleotide
  Target: LAMA2; (+) strand; PAM type: YTN; PAM sequence: CTA
atttttgtatttttagtaga

SEQ ID NO: 403154 - DNA, 20 bp, Artificial Sequence
  Description of Artificial Sequence: Synthetic oligonucleotide
  Target: LAMA2; (+) strand; PAM type: YTN; PAM sequence: TTT
ttgtatttttagtagagaca

SEQ ID NO: 403155 - DNA, 20 bp, Artificial Sequence
  Description of Artificial Sequence: Synthetic oligonucleotide
  Target: LAMA2; (+) strand; PAM type: YTN; PAM sequence: TTT
tgtatttttagtagagacag

SEQ ID NO: 403156 - DNA, 20 bp, Artificial Sequence
  Description of Artificial Sequence: Synthetic oligonucleotide
  Target: LAMA2; (+) strand; PAM type: YTN; PAM sequence: TTT
gtatttttagtagagacagg

SEQ ID NO: 403157 - DNA, 20 bp, Artificial Sequence
  Description of Artificial Sequence: Synthetic oligonucleotide
  Target: LAMA2; (+) strand; PAM type: YTN; PAM sequence: TTG
tatttttagtagagacaggg

SEQ ID NO: 403158 - DNA, 20 bp, Artificial Sequence
  Description of Artificial Sequence: Synthetic oligonucleotide
  Target: LAMA2; (+) strand; PAM type: YTN; PAM sequence: TTT
ttagtagagacagggtttca

SEQ ID NO: 403159 - DNA, 20 bp, Artificial Sequence
  Description of Artificial Sequence: Synthetic oligonucleotide
  Target: LAMA2; (+) strand; PAM type: YTN; PAM sequence: TTT
tagtagagacagggtttcac

SEQ ID NO: 403160 - DNA, 20 bp, Artificial Sequence
  Description of Artificial Sequence: Synthetic oligonucleotide
  Target: LAMA2; (+) strand; PAM type: YTN; PAM sequence: TTT
agtagagacagggtttcacc

SEQ ID NO: 403161 - DNA, 20 bp, Artificial Sequence
  Description of Artificial Sequence: Synthetic oligonucleotide
  Target: LAMA2; (+) strand; PAM type: YTN; PAM sequence: TTA
gtagagacagggtttcacca

SEQ ID NO: 403162 - DNA, 20 bp, Artificial Sequence
  Description of Artificial Sequence: Synthetic oligonucleotide
  Target: LAMA2; (+) strand; PAM type: YTN; PAM sequence: TTT
caccatgttggccaggatgg

SEQ ID NO: 403163 - DNA, 20 bp, Artificial Sequence
  Description of Artificial Sequence: Synthetic oligonucleotide
  Target: LAMA2; (+) strand; PAM type: YTN; PAM sequence: TTC
accatgttggccaggatggt

SEQ ID NO: 403164 - DNA, 20 bp, Artificial Sequence
  Description of Artificial Sequence: Synthetic oligonucleotide
  Target: LAMA2; (+) strand; PAM type: YTN; PAM sequence: TTG
gccaggatggtctggatctc

SEQ ID NO: 403165 - DNA, 20 bp, Artificial Sequence
  Description of Artificial Sequence: Synthetic oligonucleotide
  Target: LAMA2; (+) strand; PAM type: YTN; PAM sequence: CTG
gatctcctgacctcatgatc

SEQ ID NO: 403166 - DNA, 20 bp, Artificial Sequence
  Description of Artificial Sequence: Synthetic oligonucleotide
  Target: LAMA2; (+) strand; PAM type: YTN; PAM sequence: CTC
ctgacctcatgatccgccca

SEQ ID NO: 403167 - DNA, 20 bp, Artificial Sequence
  Description of Artificial Sequence: Synthetic oligonucleotide
  Target: LAMA2; (+) strand; PAM type: YTN; PAM sequence: CTG
acctcatgatccgcccatct

SEQ ID NO: 403168 - DNA, 20 bp, Artificial Sequence
  Description of Artificial Sequence: Synthetic oligonucleotide
  Target: LAMA2; (+) strand; PAM type: YTN; PAM sequence: CTC
atgatccgcccatctcagcc

SEQ ID NO: 403169 - DNA, 20 bp, Artificial Sequence
  Description of Artificial Sequence: Synthetic oligonucleotide
  Target: LAMA2; (+) strand; PAM type: YTN; PAM sequence: CTC
agcctcccaaagtgctggga

SEQ ID NO: 403170 - DNA, 20 bp, Artificial Sequence
  Description of Artificial Sequence: Synthetic oligonucleotide
  Target: LAMA2; (+) strand; PAM type: YTN; PAM sequence: CTC
ccaaagtgctgggattacag

SEQ ID NO: 403171 - DNA, 20 bp, Artificial Sequence
  Description of Artificial Sequence: Synthetic oligonucleotide
  Target: LAMA2; (+) strand; PAM type: YTN; PAM sequence: CTG
ggattacagatgtgagccat

SEQ ID NO: 403172 - DNA, 20 bp, Artificial Sequence
  Description of Artificial Sequence: Synthetic oligonucleotide
  Target: LAMA2; (+) strand; PAM type: YTN; PAM sequence: TTA
cagatgtgagccatcacacc

SEQ ID NO: 403173 - DNA, 20 bp, Artificial Sequence
  Description of Artificial Sequence: Synthetic oligonucleotide
  Target: LAMA2; (+) strand; PAM type: YTN; PAM sequence: CTC
aactgtgttttttaaacaaa

SEQ ID NO: 403174 - DNA, 20 bp, Artificial Sequence
  Description of Artificial Sequence: Synthetic oligonucleotide
  Target: LAMA2; (+) strand; PAM type: YTN; PAM sequence: CTG
tgttttttaaacaaaactga

SEQ ID NO: 403175 - DNA, 20 bp, Artificial Sequence
  Description of Artificial Sequence: Synthetic oligonucleotide
  Target: LAMA2; (+) strand; PAM type: YTN; PAM sequence: TTT
tttaaacaaaactgatttat

SEQ ID NO: 403176 - DNA, 20 bp, Artificial Sequence
  Description of Artificial Sequence: Synthetic oligonucleotide
  Target: LAMA2; (+) strand; PAM type: YTN; PAM sequence: TTT
ttaaacaaaactgatttatt

SEQ ID NO: 403177 - DNA, 20 bp, Artificial Sequence
  Description of Artificial Sequence: Synthetic oligonucleotide
  Target: LAMA2; (+) strand; PAM type: YTN; PAM sequence: TTT
taaacaaaactgatttatta

SEQ ID NO: 403178 - DNA, 20 bp, Artificial Sequence
  Description of Artificial Sequence: Synthetic oligonucleotide
  Target: LAMA2; (+) strand; PAM type: YTN; PAM sequence: TTT
aaacaaaactgatttattag

SEQ ID NO: 403179 - DNA, 20 bp, Artificial Sequence
  Description of Artificial Sequence: Synthetic oligonucleotide
  Target: LAMA2; (+) strand; PAM type: YTN; PAM sequence: TTA
aacaaaactgatttattagg

SEQ ID NO: 403180 - DNA, 20 bp, Artificial Sequence
  Description of Artificial Sequence: Synthetic oligonucleotide
  Target: LAMA2; (+) strand; PAM type: YTN; PAM sequence: CTG
atttattaggaattaaacta

SEQ ID NO: 403181 - DNA, 20 bp, Artificial Sequence
  Description of Artificial Sequence: Synthetic oligonucleotide
  Target: LAMA2; (+) strand; PAM type: YTN; PAM sequence: TTT
attaggaattaaactagcca

SEQ ID NO: 403182 - DNA, 20 bp, Artificial Sequence
  Description of Artificial Sequence: Synthetic oligonucleotide
  Target: LAMA2; (+) strand; PAM type: YTN; PAM sequence: TTA
ttaggaattaaactagccat

SEQ ID NO: 403183 - DNA, 20 bp, Artificial Sequence
  Description of Artificial Sequence: Synthetic oligonucleotide
  Target: LAMA2; (+) strand; PAM type: YTN; PAM sequence: TTA
ggaattaaactagccataat

SEQ ID NO: 403184 - DNA, 20 bp, Artificial Sequence
  Description of Artificial Sequence: Synthetic oligonucleotide
  Target: LAMA2; (+) strand; PAM type: YTN; PAM sequence: TTA
aactagccataatacagcca

SEQ ID NO: 403185 - DNA, 20 bp, Artificial Sequence
  Description of Artificial Sequence: Synthetic oligonucleotide
  Target: LAMA2; (+) strand; PAM type: YTN; PAM sequence: CTA
gccataatacagccataggg

SEQ ID NO: 403186 - DNA, 20 bp, Artificial Sequence
  Description of Artificial Sequence: Synthetic oligonucleotide
  Target: LAMA2; (+) strand; PAM type: YTN; PAM sequence: CTA
taaagcatttattaaataaa

SEQ ID NO: 403187 - DNA, 20 bp, Artificial Sequence
  Description of Artificial Sequence: Synthetic oligonucleotide
  Target: LAMA2; (+) strand; PAM type: YTN; PAM sequence: TTT
attaaataaaaatgaagtaa

SEQ ID NO: 403188 - DNA, 20 bp, Artificial Sequence
  Description of Artificial Sequence: Synthetic oligonucleotide
  Target: LAMA2; (+) strand; PAM type: YTN; PAM sequence: TTA
ttaaataaaaatgaagtaaa

SEQ ID NO: 403189 - DNA, 20 bp, Artificial Sequence
  Description of Artificial Sequence: Synthetic oligonucleotide
  Target: LAMA2; (+) strand; PAM type: YTN; PAM sequence: TTA
aataaaaatgaagtaaacta

SEQ ID NO: 403190 - DNA, 20 bp, Artificial Sequence
  Description of Artificial Sequence: Synthetic oligonucleotide
  Target: LAMA2; (+) strand; PAM type: YTN; PAM sequence: CTA
catacagtcgctttgactac

SEQ ID NO: 403191 - DNA, 20 bp, Artificial Sequence
  Description of Artificial Sequence: Synthetic oligonucleotide
  Target: LAMA2; (+) strand; PAM type: YTN; PAM sequence: CTT
tgactactaattcagcccca

SEQ ID NO: 403192 - DNA, 20 bp, Artificial Sequence
  Description of Artificial Sequence: Synthetic oligonucleotide
  Target: LAMA2; (+) strand; PAM type: YTN; PAM sequence: TTT
gactactaattcagccccat

SEQ ID NO: 403193 - DNA, 20 bp, Artificial Sequence
  Description of Artificial Sequence: Synthetic oligonucleotide
  Target: LAMA2; (+) strand; PAM type: YTN; PAM sequence: TTG
actactaattcagccccatt

SEQ ID NO: 403194 - DNA, 20 bp, Artificial Sequence
  Description of Artificial Sequence: Synthetic oligonucleotide
  Target: LAMA2; (+) strand; PAM type: YTN; PAM sequence: CTA
ctaattcagccccattcaga

SEQ ID NO: 403195 - DNA, 20 bp, Artificial Sequence
  Description of Artificial Sequence: Synthetic oligonucleotide
  Target: LAMA2; (+) strand; PAM type: YTN; PAM sequence: CTA
attcagccccattcagaatt

SEQ ID NO: 403196 - DNA, 20 bp, Artificial Sequence
  Description of Artificial Sequence: Synthetic oligonucleotide
  Target: LAMA2; (+) strand; PAM type: YTN; PAM sequence: TTC
agccccattcagaattggat

SEQ ID NO: 403197 - DNA, 20 bp, Artificial Sequence
  Description of Artificial Sequence: Synthetic oligonucleotide
  Target: LAMA2; (+) strand; PAM type: YTN; PAM sequence: TTC
agaattggatatgattgtct

SEQ ID NO: 403198 - DNA, 20 bp, Artificial Sequence
  Description of Artificial Sequence: Synthetic oligonucleotide
  Target: LAMA2; (+) strand; PAM type: YTN; PAM sequence: TTG
gatatgattgtctgccaggg

SEQ ID NO: 403199 - DNA, 20 bp, Artificial Sequence
  Description of Artificial Sequence: Synthetic oligonucleotide
  Target: LAMA2; (+) strand; PAM type: YTN; PAM sequence: TTG
tctgccagggataacgcact

SEQ ID NO: 403200 - DNA, 20 bp, Artificial Sequence
  Description of Artificial Sequence: Synthetic oligonucleotide
  Target: LAMA2; (+) strand; PAM type: YTN; PAM sequence: CTG
ccagggataacgcactatgc

SEQ ID NO: 403201 - DNA, 20 bp, Artificial Sequence
  Description of Artificial Sequence: Synthetic oligonucleotide
  Target: LAMA2; (+) strand; PAM type: YTN; PAM sequence: CTA
tgctattcagttctactcat

SEQ ID NO: 403202 - DNA, 20 bp, Artificial Sequence
  Description of Artificial Sequence: Synthetic oligonucleotide
  Target: LAMA2; (+) strand; PAM type: YTN; PAM sequence: CTA
ttcagttctactcatgaatt

SEQ ID NO: 403203 - DNA, 20 bp, Artificial Sequence
  Description of Artificial Sequence: Synthetic oligonucleotide
  Target: LAMA2; (+) strand; PAM type: YTN; PAM sequence: TTC
agttctactcatgaattcca

SEQ ID NO: 403204 - DNA, 20 bp, Artificial Sequence
  Description of Artificial Sequence: Synthetic oligonucleotide
  Target: LAMA2; (+) strand; PAM type: YTN; PAM sequence: TTC
tactcatgaattccagtcag

SEQ ID NO: 403205 - DNA, 20 bp, Artificial Sequence
  Description of Artificial Sequence: Synthetic oligonucleotide
  Target: LAMA2; (+) strand; PAM type: YTN; PAM sequence: CTA
ctcatgaattccagtcagat

SEQ ID NO: 403206 - DNA, 20 bp, Artificial Sequence
  Description of Artificial Sequence: Synthetic oligonucleotide
  Target: LAMA2; (+) strand; PAM type: YTN; PAM sequence: CTC
atgaattccagtcagatctt

SEQ ID NO: 403207 - DNA, 20 bp, Artificial Sequence
  Description of Artificial Sequence: Synthetic oligonucleotide
  Target: LAMA2; (+) strand; PAM type: YTN; PAM sequence: TTC
cagtcagatcttgatttctt

SEQ ID NO: 403208 - DNA, 20 bp, Artificial Sequence
  Description of Artificial Sequence: Synthetic oligonucleotide
  Target: LAMA2; (+) strand; PAM type: YTN; PAM sequence: CTT
gatttcttgttcactttgat

SEQ ID NO: 403209 - DNA, 20 bp, Artificial Sequence
  Description of Artificial Sequence: Synthetic oligonucleotide
  Target: LAMA2; (+) strand; PAM type: YTN; PAM sequence: TTG
atttcttgttcactttgatc

SEQ ID NO: 403210 - DNA, 20 bp, Artificial Sequence
  Description of Artificial Sequence: Synthetic oligonucleotide
  Target: LAMA2; (+) strand; PAM type: YTN; PAM sequence: TTT
cttgttcactttgatcctct

SEQ ID NO: 403211 - DNA, 20 bp, Artificial Sequence
  Description of Artificial Sequence: Synthetic oligonucleotide
  Target: LAMA2; (+) strand; PAM type: YTN; PAM sequence: TTC
ttgttcactttgatcctctt

SEQ ID NO: 403212 - DNA, 20 bp, Artificial Sequence
  Description of Artificial Sequence: Synthetic oligonucleotide
  Target: LAMA2; (+) strand; PAM type: YTN; PAM sequence: CTT
gttcactttgatcctcttat

SEQ ID NO: 403213 - DNA, 20 bp, Artificial Sequence
  Description of Artificial Sequence: Synthetic oligonucleotide
  Target: LAMA2; (+) strand; PAM type: YTN; PAM sequence: TTG
ttcactttgatcctcttatg

SEQ ID NO: 403214 - DNA, 20 bp, Artificial Sequence
  Description of Artificial Sequence: Synthetic oligonucleotide
  Target: LAMA2; (+) strand; PAM type: YTN; PAM sequence: TTC
actttgatcctcttatgatg

SEQ ID NO: 403215 - DNA, 20 bp, Artificial Sequence
  Description of Artificial Sequence: Synthetic oligonucleotide
  Target: LAMA2; (+) strand; PAM type: YTN; PAM sequence: CTT
tgatcctcttatgatgtcaa

SEQ ID NO: 403216 - DNA, 20 bp, Artificial Sequence
  Description of Artificial Sequence: Synthetic oligonucleotide
  Target: LAMA2; (+) strand; PAM type: YTN; PAM sequence: TTT
gatcctcttatgatgtcaat

SEQ ID NO: 403217 - DNA, 20 bp, Artificial Sequence
  Description of Artificial Sequence: Synthetic oligonucleotide
  Target: LAMA2; (+) strand; PAM type: YTN; PAM sequence: TTG
atcctcttatgatgtcaatg

SEQ ID NO: 403218 - DNA, 20 bp, Artificial Sequence
  Description of Artificial Sequence: Synthetic oligonucleotide
  Target: LAMA2; (+) strand; PAM type: YTN; PAM sequence: CTC
ttatgatgtcaatggtacgt

SEQ ID NO: 403219 - DNA, 20 bp, Artificial Sequence
  Description of Artificial Sequence: Synthetic oligonucleotide
  Target: LAMA2; (+) strand; PAM type: YTN; PAM sequence: CTT
atgatgtcaatggtacgtat

SEQ ID NO: 403220 - DNA, 20 bp, Artificial Sequence
  Description of Artificial Sequence: Synthetic oligonucleotide
  Target: LAMA2; (+) strand; PAM type: YTN; PAM sequence: TTA
tgatgtcaatggtacgtata

SEQ ID NO: 403221 - DNA, 20 bp, Artificial Sequence
  Description of Artificial Sequence: Synthetic oligonucleotide
  Target: LAMA2; (+) strand; PAM type: YTN; PAM sequence: CTG
cctcagatattaaattttct

SEQ ID NO: 403222 - DNA, 20 bp, Artificial Sequence
  Description of Artificial Sequence: Synthetic oligonucleotide
  Target: LAMA2; (+) strand; PAM type: YTN; PAM sequence: CTC
agatattaaattttctcaat

SEQ ID NO: 403223 - DNA, 20 bp, Artificial Sequence
  Description of Artificial Sequence: Synthetic oligonucleotide
  Target: LAMA2; (+) strand; PAM type: YTN; PAM sequence: TTA
aattttctcaatgccaaggt

SEQ ID NO: 403224 - DNA, 20 bp, Artificial Sequence
  Description of Artificial Sequence: Synthetic oligonucleotide
  Target: LAMA2; (+) strand; PAM type: YTN; PAM sequence: TTT
tctcaatgccaaggtcttct

SEQ ID NO: 403225 - DNA, 20 bp, Artificial Sequence
  Description of Artificial Sequence: Synthetic oligonucleotide
  Target: LAMA2; (+) strand; PAM type: YTN; PAM sequence: TTT
ctcaatgccaaggtcttctc

SEQ ID NO: 403226 - DNA, 20 bp, Artificial Sequence
  Description of Artificial Sequence: Synthetic oligonucleotide
  Target: LAMA2; (+) strand; PAM type: YTN; PAM sequence: TTC
tcaatgccaaggtcttctct

SEQ ID NO: 403227 - DNA, 20 bp, Artificial Sequence
  Description of Artificial Sequence: Synthetic oligonucleotide
  Target: LAMA2; (+) strand; PAM type: YTN; PAM sequence: CTC
aatgccaaggtcttctctga

SEQ ID NO: 403228 - DNA, 20 bp, Artificial Sequence
  Description of Artificial Sequence: Synthetic oligonucleotide
  Target: LAMA2; (+) strand; PAM type: YTN; PAM sequence: CTT
ctctgataatgattttggtt

SEQ ID NO: 403229 - DNA, 20 bp, Artificial Sequence
  Description of Artificial Sequence: Synthetic oligonucleotide
  Target: LAMA2; (+) strand; PAM type: YTN; PAM sequence: TTC
tctgataatgattttggttc

SEQ ID NO: 403230 - DNA, 20 bp, Artificial Sequence
  Description of Artificial Sequence: Synthetic oligonucleotide
  Target: LAMA2; (+) strand; PAM type: YTN; PAM sequence: CTC
tgataatgattttggttcac

SEQ ID NO: 403231 - DNA, 20 bp, Artificial Sequence
  Description of Artificial Sequence: Synthetic oligonucleotide
  Target: LAMA2; (+) strand; PAM type: YTN; PAM sequence: CTG
ataatgattttggttcactt

SEQ ID NO: 403232 - DNA, 20 bp, Artificial Sequence
  Description of Artificial Sequence: Synthetic oligonucleotide
  Target: LAMA2; (+) strand; PAM type: YTN; PAM sequence: TTT
tggttcactttcagcagctt

SEQ ID NO: 403233 - DNA, 20 bp, Artificial Sequence
  Description of Artificial Sequence: Synthetic oligonucleotide
  Target: LAMA2; (+) strand; PAM type: YTN; PAM sequence: TTT
ggttcactttcagcagcttg

SEQ ID NO: 403234 - DNA, 20 bp, Artificial Sequence
  Description of Artificial Sequence: Synthetic oligonucleotide
  Target: LAMA2; (+) strand; PAM type: YTN; PAM sequence: TTG
gttcactttcagcagcttgc

SEQ ID NO: 403235 - DNA, 20 bp, Artificial Sequence
  Description of Artificial Sequence: Synthetic oligonucleotide
  Target: LAMA2; (+) strand; PAM type: YTN; PAM sequence: TTC
actttcagcagcttgctaaa

SEQ ID NO: 403236 - DNA, 20 bp, Artificial Sequence
  Description of Artificial Sequence: Synthetic oligonucleotide
  Target: LAMA2; (+) strand; PAM type: YTN; PAM sequence: CTT
tcagcagcttgctaaaaaat

SEQ ID NO: 403237 - DNA, 20 bp, Artificial Sequence
  Description of Artificial Sequence: Synthetic oligonucleotide
  Target: LAMA2; (+) strand; PAM type: YTN; PAM sequence: TTT
cagcagcttgctaaaaaatc

SEQ ID NO: 403238 - DNA, 20 bp, Artificial Sequence
  Description of Artificial Sequence: Synthetic oligonucleotide
  Target: LAMA2; (+) strand; PAM type: YTN; PAM sequence: TTC
agcagcttgctaaaaaatca

SEQ ID NO: 403239 - DNA, 20 bp, Artificial Sequence
  Description of Artificial Sequence: Synthetic oligonucleotide
  Target: LAMA2; (+) strand; PAM type: YTN; PAM sequence: CTT
gctaaaaaatcactatatct

SEQ ID NO: 403240 - DNA, 20 bp, Artificial Sequence
  Description of Artificial Sequence: Synthetic oligonucleotide
  Target: LAMA2; (+) strand; PAM type: YTN; PAM sequence: TTG
ctaaaaaatcactatatctg

SEQ ID NO: 403241 - DNA, 20 bp, Artificial Sequence
  Description of Artificial Sequence: Synthetic oligonucleotide
  Target: LAMA2; (+) strand; PAM type: YTN; PAM sequence: CTA
aaaaatcactatatctgaca

SEQ ID NO: 403242 - DNA, 20 bp, Artificial Sequence
  Description of Artificial Sequence: Synthetic oligonucleotide
  Target: LAMA2; (+) strand; PAM type: YTN; PAM sequence: CTA
tatctgacaccctttcctga

SEQ ID NO: 403243 - DNA, 20 bp, Artificial Sequence
  Description of Artificial Sequence: Synthetic oligonucleotide
  Target: LAMA2; (+) strand; PAM type: YTN; PAM sequence: CTG
acaccctttcctgaacatta

SEQ ID NO: 403244 - DNA, 20 bp, Artificial Sequence
  Description of Artificial Sequence: Synthetic oligonucleotide
  Target: LAMA2; (+) strand; PAM type: YTN; PAM sequence: CTT
tcctgaacattaaaaatatc

SEQ ID NO: 403245 - DNA, 20 bp, Artificial Sequence
  Description of Artificial Sequence: Synthetic oligonucleotide
  Target: LAMA2; (+) strand; PAM type: YTN; PAM sequence: TTT
cctgaacattaaaaatatct

SEQ ID NO: 403246 - DNA, 20 bp, Artificial Sequence
  Description of Artificial Sequence: Synthetic oligonucleotide
  Target: LAMA2; (+) strand; PAM type: YTN; PAM sequence: TTC
ctgaacattaaaaatatctg

SEQ ID NO: 403247 - DNA, 20 bp, Artificial Sequence
  Description of Artificial Sequence: Synthetic oligonucleotide
  Target: LAMA2; (+) strand; PAM type: YTN; PAM sequence: CTG
aacattaaaaatatctgaag

SEQ ID NO: 403248 - DNA, 20 bp, Artificial Sequence
  Description of Artificial Sequence: Synthetic oligonucleotide
  Target: LAMA2; (+) strand; PAM type: YTN; PAM sequence: TTA
aaaatatctgaagaccatat

SEQ ID NO: 403249 - DNA, 20 bp, Artificial Sequence
  Description of Artificial Sequence: Synthetic oligonucleotide
  Target: LAMA2; (+) strand; PAM type: YTN; PAM sequence: CTG
aagaccatatttttcccacc

SEQ ID NO: 403250 - DNA, 20 bp, Artificial Sequence
  Description of Artificial Sequence: Synthetic oligonucleotide
  Target: LAMA2; (+) strand; PAM type: YTN; PAM sequence: TTT
ttcccacctgccctctactg

SEQ ID NO: 403251 - DNA, 20 bp, Artificial Sequence
  Description of Artificial Sequence: Synthetic oligonucleotide
  Target: LAMA2; (+) strand; PAM type: YTN; PAM sequence: TTT
tcccacctgccctctactgt

SEQ ID NO: 403252 - DNA, 20 bp, Artificial Sequence
  Description of Artificial Sequence: Synthetic oligonucleotide
  Target: LAMA2; (+) strand; PAM type: YTN; PAM sequence: TTT
cccacctgccctctactgtg

SEQ ID NO: 403253 - DNA, 20 bp, Artificial Sequence
  Description of Artificial Sequence: Synthetic oligonucleotide
  Target: LAMA2; (+) strand; PAM type: YTN; PAM sequence: TTC
ccacctgccctctactgtgc

SEQ ID NO: 403254 - DNA, 20 bp, Artificial Sequence
  Description of Artificial Sequence: Synthetic oligonucleotide
  Target: LAMA2; (+) strand; PAM type: YTN; PAM sequence: CTG
ccctctactgtgctgtcttt

SEQ ID NO: 403255 - DNA, 20 bp, Artificial Sequence
  Description of Artificial Sequence: Synthetic oligonucleotide
  Target: LAMA2; (+) strand; PAM type: YTN; PAM sequence: CTC
tactgtgctgtctttctctt

SEQ ID NO: 403256 - DNA, 20 bp, Artificial Sequence
  Description of Artificial Sequence: Synthetic oligonucleotide
  Target: LAMA2; (+) strand; PAM type: YTN; PAM sequence: CTA
ctgtgctgtctttctcttgc

SEQ ID NO: 403257 - DNA, 20 bp, Artificial Sequence
  Description of Artificial Sequence: Synthetic oligonucleotide
  Target: LAMA2; (+) strand; PAM type: YTN; PAM sequence: CTG
tgctgtctttctcttgcttc

SEQ ID NO: 403258 - DNA, 20 bp, Artificial Sequence
  Description of Artificial Sequence: Synthetic oligonucleotide
  Target: LAMA2; (+) strand; PAM type: YTN; PAM sequence: CTG
tctttctcttgcttctctct

SEQ ID NO: 403259 - DNA, 20 bp, Artificial Sequence
  Description of Artificial Sequence: Synthetic oligonucleotide
  Target: LAMA2; (+) strand; PAM type: YTN; PAM sequence: CTT
tctcttgcttctctcttttt

SEQ ID NO: 403260 - DNA, 20 bp, Artificial Sequence
  Description of Artificial Sequence: Synthetic oligonucleotide
  Target: LAMA2; (+) strand; PAM type: YTN; PAM sequence: TTT
ctcttgcttctctcttttta

SEQ ID NO: 403261 - DNA, 20 bp, Artificial Sequence
  Description of Artificial Sequence: Synthetic oligonucleotide
  Target: LAMA2; (+) strand; PAM type: YTN; PAM sequence: TTC
tcttgcttctctctttttat

SEQ ID NO: 403262 - DNA, 20 bp, Artificial Sequence
  Description of Artificial Sequence: Synthetic oligonucleotide
  Target: LAMA2; (+) strand; PAM type: YTN; PAM sequence: CTC
ttgcttctctctttttatct

SEQ ID NO: 403263 - DNA, 20 bp, Artificial Sequence
  Description of Artificial Sequence: Synthetic oligonucleotide
  Target: LAMA2; (+) strand; PAM type: YTN; PAM sequence: CTT
gcttctctctttttatctct

SEQ ID NO: 403264 - DNA, 20 bp, Artificial Sequence
  Description of Artificial Sequence: Synthetic oligonucleotide
  Target: LAMA2; (+) strand; PAM type: YTN; PAM sequence: TTG
cttctctctttttatctcta

SEQ ID NO: 403265 - DNA, 20 bp, Artificial Sequence
  Description of Artificial Sequence: Synthetic oligonucleotide
  Target: LAMA2; (+) strand; PAM type: YTN; PAM sequence: CTT
ctctctttttatctctaatc

SEQ ID NO: 403266 - DNA, 20 bp, Artificial Sequence
  Description of Artificial Sequence: Synthetic oligonucleotide
  Target: LAMA2; (+) strand; PAM type: YTN; PAM sequence: TTC
tctctttttatctctaatcc

SEQ ID NO: 403267 - DNA, 20 bp, Artificial Sequence
  Description of Artificial Sequence: Synthetic oligonucleotide
  Target: LAMA2; (+) strand; PAM type: YTN; PAM sequence: CTC
tctttttatctctaatccct

SEQ ID NO: 403268 - DNA, 20 bp, Artificial Sequence
  Description of Artificial Sequence: Synthetic oligonucleotide
  Target: LAMA2; (+) strand; PAM type: YTN; PAM sequence: CTC
tttttatctctaatcccttg

SEQ ID NO: 403269 - DNA, 20 bp, Artificial Sequence
  Description of Artificial Sequence: Synthetic oligonucleotide
  Target: LAMA2; (+) strand; PAM type: YTN; PAM sequence: CTT
tttatctctaatcccttgga

SEQ ID NO: 403270 - DNA, 20 bp, Artificial Sequence
  Description of Artificial Sequence: Synthetic oligonucleotide
  Target: LAMA2; (+) strand; PAM type: YTN; PAM sequence: TTT
ttatctctaatcccttggat

SEQ ID NO: 403271 - DNA, 20 bp, Artificial Sequence
  Description of Artificial Sequence: Synthetic oligonucleotide
  Target: LAMA2; (+) strand; PAM type: YTN; PAM sequence: TTT
tatctctaatcccttggatg

SEQ ID NO: 403272 - DNA, 20 bp, Artificial Sequence
  Description of Artificial Sequence: Synthetic oligonucleotide
  Target: LAMA2; (+) strand; PAM type: YTN; PAM sequence: TTT
atctctaatcccttggatga

SEQ ID NO: 403273 - DNA, 20 bp, Artificial Sequence
  Description of Artificial Sequence: Synthetic oligonucleotide
  Target: LAMA2; (+) strand; PAM type: YTN; PAM sequence: TTA
tctctaatcccttggatgac

SEQ ID NO: 403274 - DNA, 20 bp, Artificial Sequence
  Description of Artificial Sequence: Synthetic oligonucleotide
  Target: LAMA2; (+) strand; PAM type: YTN; PAM sequence: CTC
taatcccttggatgaccctt

SEQ ID NO: 403275 - DNA, 20 bp, Artificial Sequence
  Description of Artificial Sequence: Synthetic oligonucleotide
  Target: LAMA2; (+) strand; PAM type: YTN; PAM sequence: CTA
atcccttggatgacccttgg

SEQ ID NO: 403276 - DNA, 20 bp, Artificial Sequence
  Description of Artificial Sequence: Synthetic oligonucleotide
  Target: LAMA2; (+) strand; PAM type: YTN; PAM sequence: CTT
ggatgacccttggtatagct

SEQ ID NO: 403277 - DNA, 20 bp, Artificial Sequence
  Description of Artificial Sequence: Synthetic oligonucleotide
  Target: LAMA2; (+) strand; PAM type: YTN; PAM sequence: TTG
gatgacccttggtatagctg

SEQ ID NO: 403278 - DNA, 20 bp, Artificial Sequence
  Description of Artificial Sequence: Synthetic oligonucleotide
  Target: LAMA2; (+) strand; PAM type: YTN; PAM sequence: CTT
ggtatagctgccattgtatc

SEQ ID NO: 403279 - DNA, 20 bp, Artificial Sequence
  Description of Artificial Sequence: Synthetic oligonucleotide
  Target: LAMA2; (+) strand; PAM type: YTN; PAM sequence: TTG
gtatagctgccattgtatca

SEQ ID NO: 403280 - DNA, 20 bp, Artificial Sequence
  Description of Artificial Sequence: Synthetic oligonucleotide
  Target: LAMA2; (+) strand; PAM type: YTN; PAM sequence: CTG
ccattgtatcacagaacacc

SEQ ID NO: 403281 - DNA, 20 bp, Artificial Sequence
  Description of Artificial Sequence: Synthetic oligonucleotide
  Target: LAMA2; (+) strand; PAM type: YTN; PAM sequence: TTG
tatcacagaacaccctttgc

SEQ ID NO: 403282 - DNA, 20 bp, Artificial Sequence
  Description of Artificial Sequence: Synthetic oligonucleotide
  Target: LAMA2; (+) strand; PAM type: YTN; PAM sequence: CTT
tgccaagtcccattgctcat

SEQ ID NO: 403283 - DNA, 20 bp, Artificial Sequence
  Description of Artificial Sequence: Synthetic oligonucleotide
  Target: LAMA2; (+) strand; PAM type: YTN; PAM sequence: TTT
gccaagtcccattgctcatc

SEQ ID NO: 403284 - DNA, 20 bp, Artificial Sequence
  Description of Artificial Sequence: Synthetic oligonucleotide
  Target: LAMA2; (+) strand; PAM type: YTN; PAM sequence: TTG
ccaagtcccattgctcatct

SEQ ID NO: 403285 - DNA, 20 bp, Artificial Sequence
  Description of Artificial Sequence: Synthetic oligonucleotide
  Target: LAMA2; (+) strand; PAM type: YTN; PAM sequence: TTG
ctcatctgctttgccatatt

SEQ ID NO: 403286 - DNA, 20 bp, Artificial Sequence
  Description of Artificial Sequence: Synthetic oligonucleotide
  Target: LAMA2; (+) strand; PAM type: YTN; PAM sequence: CTC
atctgctttgccatattaac

SEQ ID NO: 403287 - DNA, 20 bp, Artificial Sequence
  Description of Artificial Sequence: Synthetic oligonucleotide
  Target: LAMA2; (+) strand; PAM type: YTN; PAM sequence: CTG
ctttgccatattaacatcca

SEQ ID NO: 403288 - DNA, 20 bp, Artificial Sequence
  Description of Artificial Sequence: Synthetic oligonucleotide
  Target: LAMA2; (+) strand; PAM type: YTN; PAM sequence: CTT
tgccatattaacatccaagt

SEQ ID NO: 403289 - DNA, 20 bp, Artificial Sequence
  Description of Artificial Sequence: Synthetic oligonucleotide
  Target: LAMA2; (+) strand; PAM type: YTN; PAM sequence: TTT
gccatattaacatccaagta

SEQ ID NO: 403290 - DNA, 20 bp, Artificial Sequence
  Description of Artificial Sequence: Synthetic oligonucleotide
  Target: LAMA2; (+) strand; PAM type: YTN; PAM sequence: TTG
ccatattaacatccaagtaa

SEQ ID NO: 403291 - DNA, 20 bp, Artificial Sequence
  Description of Artificial Sequence: Synthetic oligonucleotide
  Target: LAMA2; (+) strand; PAM type: YTN; PAM sequence: TTA
acatccaagtaaaaattgta

SEQ ID NO: 403292 - DNA, 20 bp, Artificial Sequence
  Description of Artificial Sequence: Synthetic oligonucleotide
  Target: LAMA2; (+) strand; PAM type: YTN; PAM sequence: TTG
tacatttcctacctccattg

SEQ ID NO: 403293 - DNA, 20 bp, Artificial Sequence
  Description of Artificial Sequence: Synthetic oligonucleotide
  Target: LAMA2; (+) strand; PAM type: YTN; PAM sequence: TTT
cctacctccattgttttgca

SEQ ID NO: 403294 - DNA, 20 bp, Artificial Sequence
  Description of Artificial Sequence: Synthetic oligonucleotide
  Target: LAMA2; (+) strand; PAM type: YTN; PAM sequence: TTC
ctacctccattgttttgcaa

SEQ ID NO: 403295 - DNA, 20 bp, Artificial Sequence
  Description of Artificial Sequence: Synthetic oligonucleotide
  Target: LAMA2; (+) strand; PAM type: YTN; PAM sequence: CTA
cctccattgttttgcaattc

SEQ ID NO: 403296 - DNA, 20 bp, Artificial Sequence
  Description of Artificial Sequence: Synthetic oligonucleotide
  Target: LAMA2; (+) strand; PAM type: YTN; PAM sequence: CTC
cattgttttgcaattcattt

SEQ ID NO: 403297 - DNA, 20 bp, Artificial Sequence
  Description of Artificial Sequence: Synthetic oligonucleotide
  Target: LAMA2; (+) strand; PAM type: YTN; PAM sequence: TTG
ttttgcaattcattttcact

SEQ ID NO: 403298 - DNA, 20 bp, Artificial Sequence
  Description of Artificial Sequence: Synthetic oligonucleotide
  Target: LAMA2; (+) strand; PAM type: YTN; PAM sequence: TTT
tgcaattcattttcactcac

SEQ ID NO: 403299 - DNA, 20 bp, Artificial Sequence
  Description of Artificial Sequence: Synthetic oligonucleotide
  Target: LAMA2; (+) strand; PAM type: YTN; PAM sequence: TTT
gcaattcattttcactcacc

SEQ ID NO: 403300 - DNA, 20 bp, Artificial Sequence
  Description of Artificial Sequence: Synthetic oligonucleotide
  Target: LAMA2; (+) strand; PAM type: YTN; PAM sequence: TTG
caattcattttcactcacct

SEQ ID NO: 403301 - DNA, 20 bp, Artificial Sequence
  Description of Artificial Sequence: Synthetic oligonucleotide
  Target: LAMA2; (+) strand; PAM type: YTN; PAM sequence: TTC
attttcactcacctactctc

SEQ ID NO: 403302 - DNA, 20 bp, Artificial Sequence
  Description of Artificial Sequence: Synthetic oligonucleotide
  Target: LAMA2; (+) strand; PAM type: YTN; PAM sequence: TTT
tcactcacctactctcaaca

SEQ ID NO: 403303 - DNA, 20 bp, Artificial Sequence
  Description of Artificial Sequence: Synthetic oligonucleotide
  Target: LAMA2; (+) strand; PAM type: YTN; PAM sequence: TTT
cactcacctactctcaacac

SEQ ID NO: 403304 - DNA, 20 bp, Artificial Sequence
  Description of Artificial Sequence: Synthetic oligonucleotide
  Target: LAMA2; (+) strand; PAM type: YTN; PAM sequence: TTC
actcacctactctcaacact

SEQ ID NO: 403305 - DNA, 20 bp, Artificial Sequence
  Description of Artificial Sequence: Synthetic oligonucleotide
  Target: LAMA2; (+) strand; PAM type: YTN; PAM sequence: CTC
acctactctcaacactgtat

SEQ ID NO: 403306 - DNA, 20 bp, Artificial Sequence
  Description of Artificial Sequence: Synthetic oligonucleotide
  Target: LAMA2; (+) strand; PAM type: YTN; PAM sequence: CTA
ctctcaacactgtatgtaga

SEQ ID NO: 403307 - DNA, 20 bp, Artificial Sequence
  Description of Artificial Sequence: Synthetic oligonucleotide
  Target: LAMA2; (+) strand; PAM type: YTN; PAM sequence: CTC
tcaacactgtatgtagaagg

SEQ ID NO: 403308 - DNA, 20 bp, Artificial Sequence
  Description of Artificial Sequence: Synthetic oligonucleotide
  Target: LAMA2; (+) strand; PAM type: YTN; PAM sequence: CTC
aacactgtatgtagaaggga

SEQ ID NO: 403309 - DNA, 20 bp, Artificial Sequence
  Description of Artificial Sequence: Synthetic oligonucleotide
  Target: LAMA2; (+) strand; PAM type: YTN; PAM sequence: CTG
tatgtagaagggaaattcca

SEQ ID NO: 403310 - DNA, 20 bp, Artificial Sequence
  Description of Artificial Sequence: Synthetic oligonucleotide
  Target: LAMA2; (+) strand; PAM type: YTN; PAM sequence: TTC
catgatttgtgaagcaggaa

SEQ ID NO: 403311 - DNA, 20 bp, Artificial Sequence
  Description of Artificial Sequence: Synthetic oligonucleotide
  Target: LAMA2; (+) strand; PAM type: YTN; PAM sequence: TTT
gtgaagcaggaactaacttc

SEQ ID NO: 403312 - DNA, 20 bp, Artificial Sequence
  Description of Artificial Sequence: Synthetic oligonucleotide
  Target: LAMA2; (+) strand; PAM type: YTN; PAM sequence: TTG
tgaagcaggaactaacttcc

SEQ ID NO: 403313 - DNA, 20 bp, Artificial Sequence
  Description of Artificial Sequence: Synthetic oligonucleotide
  Target: LAMA2; (+) strand; PAM type: YTN; PAM sequence: CTA
acttcccaactgaaaaccac

SEQ ID NO: 403314 - DNA, 20 bp, Artificial Sequence
  Description of Artificial Sequence: Synthetic oligonucleotide
  Target: LAMA2; (+) strand; PAM type: YTN; PAM sequence: CTT
cccaactgaaaaccacccta

SEQ ID NO: 403315 - DNA, 20 bp, Artificial Sequence
  Description of Artificial Sequence: Synthetic oligonucleotide
  Target: LAMA2; (+) strand; PAM type: YTN; PAM sequence: TTC
ccaactgaaaaccaccctat

SEQ ID NO: 403316 - DNA, 20 bp, Artificial Sequence
  Description of Artificial Sequence: Synthetic oligonucleotide
  Target: LAMA2; (+) strand; PAM type: YTN; PAM sequence: CTG
aaaaccaccctatccagaag

SEQ ID NO: 403317 - DNA, 20 bp, Artificial Sequence
  Description of Artificial Sequence: Synthetic oligonucleotide
  Target: LAMA2; (+) strand; PAM type: YTN; PAM sequence: CTA
tccagaagactgtctcccta

SEQ ID NO: 403318 - DNA, 20 bp, Artificial Sequence
  Description of Artificial Sequence: Synthetic oligonucleotide
  Target: LAMA2; (+) strand; PAM type: YTN; PAM sequence: CTG
tctccctaggacacagaaca

SEQ ID NO: 403319 - DNA, 20 bp, Artificial Sequence
  Description of Artificial Sequence: Synthetic oligonucleotide
  Target: LAMA2; (+) strand; PAM type: YTN; PAM sequence: CTC
cctaggacacagaacaaaca

SEQ ID NO: 403320 - DNA, 20 bp, Artificial Sequence
  Description of Artificial Sequence: Synthetic oligonucleotide
  Target: LAMA2; (+) strand; PAM type: YTN; PAM sequence: CTA
ggacacagaacaaacactct

SEQ ID NO: 403321 - DNA, 20 bp, Artificial Sequence
  Description of Artificial Sequence: Synthetic oligonucleotide
  Target: LAMA2; (+) strand; PAM type: YTN; PAM sequence: CTC
tgaggaccatagttggccct

SEQ ID NO: 403322 - DNA, 20 bp, Artificial Sequence
  Description of Artificial Sequence: Synthetic oligonucleotide
  Target: LAMA2; (+) strand; PAM type: YTN; PAM sequence: CTG
aggaccatagttggccctga

SEQ ID NO: 403323 - DNA, 20 bp, Artificial Sequence
  Description of Artificial Sequence: Synthetic oligonucleotide
  Target: LAMA2; (+) strand; PAM type: YTN; PAM sequence: TTG
gccctgagtcctgcacccag

SEQ ID NO: 403324 - DNA, 20 bp, Artificial Sequence
  Description of Artificial Sequence: Synthetic oligonucleotide
  Target: LAMA2; (+) strand; PAM type: YTN; PAM sequence: CTG
agtcctgcacccagcagttg

SEQ ID NO: 403325 - DNA, 20 bp, Artificial Sequence
  Description of Artificial Sequence: Synthetic oligonucleotide
  Target: LAMA2; (+) strand; PAM type: YTN; PAM sequence: CTG
cacccagcagttggcaggct

SEQ ID NO: 403326 - DNA, 20 bp, Artificial Sequence
  Description of Artificial Sequence: Synthetic oligonucleotide
  Target: LAMA2; (+) strand; PAM type: YTN; PAM sequence: TTG
gcaggctggccccacctttt

SEQ ID NO: 403327 - DNA, 20 bp, Artificial Sequence
  Description of Artificial Sequence: Synthetic oligonucleotide
  Target: LAMA2; (+) strand; PAM type: YTN; PAM sequence: CTG
gccccacctttttggggaag

SEQ ID NO: 403328 - DNA, 20 bp, Artificial Sequence
  Description of Artificial Sequence: Synthetic oligonucleotide
  Target: LAMA2; (+) strand; PAM type: YTN; PAM sequence: CTT
tttggggaaggcaagaataa

SEQ ID NO: 403329 - DNA, 20 bp, Artificial Sequence
  Description of Artificial Sequence: Synthetic oligonucleotide
  Target: LAMA2; (+) strand; PAM type: YTN; PAM sequence: TTT
ttggggaaggcaagaataag

SEQ ID NO: 403330 - DNA, 20 bp, Artificial Sequence
  Description of Artificial Sequence: Synthetic oligonucleotide
  Target: LAMA2; (+) strand; PAM type: YTN; PAM sequence: TTT
tggggaaggcaagaataaga

SEQ ID NO: 403331 - DNA, 20 bp, Artificial Sequence
  Description of Artificial Sequence: Synthetic oligonucleotide
  Target: LAMA2; (+) strand; PAM type: YTN; PAM sequence: TTT
ggggaaggcaagaataagaa

SEQ ID NO: 403332 - DNA, 20 bp, Artificial Sequence
  Description of Artificial Sequence: Synthetic oligonucleotide
  Target: LAMA2; (+) strand; PAM type: YTN; PAM sequence: TTG
gggaaggcaagaataagaaa

SEQ ID NO: 403333 - DNA, 20 bp, Artificial Sequence
  Description of Artificial Sequence: Synthetic oligonucleotide
  Target: LAMA2; (+) strand; PAM type: YTN; PAM sequence: TTT
aagcagtaggcttcctggaa

SEQ ID NO: 403334 - DNA, 20 bp, Artificial Sequence
  Description of Artificial Sequence: Synthetic oligonucleotide
  Target: LAMA2; (+) strand; PAM type: YTN; PAM sequence: TTA
agcagtaggcttcctggaat

SEQ ID NO: 403335 - DNA, 20 bp, Artificial Sequence
  Description of Artificial Sequence: Synthetic oligonucleotide
  Target: LAMA2; (+) strand; PAM type: YTN; PAM sequence: CTT
cctggaatgtccagccccag

SEQ ID NO: 403336 - DNA, 20 bp, Artificial Sequence
  Description of Artificial Sequence: Synthetic oligonucleotide
  Target: LAMA2; (+) strand; PAM type: YTN; PAM sequence: TTC
ctggaatgtccagccccagg

SEQ ID NO: 403337 - DNA, 20 bp, Artificial Sequence
  Description of Artificial Sequence: Synthetic oligonucleotide
  Target: LAMA2; (+) strand; PAM type: YTN; PAM sequence: CTG
gaatgtccagccccaggcca

SEQ ID NO: 403338 - DNA, 20 bp, Artificial Sequence
  Description of Artificial Sequence: Synthetic oligonucleotide
  Target: LAMA2; (+) strand; PAM type: YTN; PAM sequence: CTC
aggcctccagcagtcaccct

SEQ ID NO: 403339 - DNA, 20 bp, Artificial Sequence
  Description of Artificial Sequence: Synthetic oligonucleotide
  Target: LAMA2; (+) strand; PAM type: YTN; PAM sequence: CTC
cagcagtcaccctcctctgg

SEQ ID NO: 403340 - DNA, 20 bp, Artificial Sequence
  Description of Artificial Sequence: Synthetic oligonucleotide
  Target: LAMA2; (+) strand; PAM type: YTN; PAM sequence: CTC
ctctgggtggtggaggaaac

SEQ ID NO: 403341 - DNA, 20 bp, Artificial Sequence
  Description of Artificial Sequence: Synthetic oligonucleotide
  Target: LAMA2; (+) strand; PAM type: YTN; PAM sequence: CTC
tgggtggtggaggaaacagc

SEQ ID NO: 403342 - DNA, 20 bp, Artificial Sequence
  Description of Artificial Sequence: Synthetic oligonucleotide
  Target: LAMA2; (+) strand; PAM type: YTN; PAM sequence: CTG
ggtggtggaggaaacagccc

SEQ ID NO: 403343 - DNA, 20 bp, Artificial Sequence
  Description of Artificial Sequence: Synthetic oligonucleotide
  Target: LAMA2; (+) strand; PAM type: YTN; PAM sequence: CTG
tttctctccagaacacagtg

SEQ ID NO: 403344 - DNA, 20 bp, Artificial Sequence
  Description of Artificial Sequence: Synthetic oligonucleotide
  Target: LAMA2; (+) strand; PAM type: YTN; PAM sequence: TTT
ctctccagaacacagtgtcc

SEQ ID NO: 403345 - DNA, 20 bp, Artificial Sequence
  Description of Artificial Sequence: Synthetic oligonucleotide
  Target: LAMA2; (+) strand; PAM type: YTN; PAM sequence: TTC
tctccagaacacagtgtcct

SEQ ID NO: 403346 - DNA, 20 bp, Artificial Sequence
  Description of Artificial Sequence: Synthetic oligonucleotide
  Target: LAMA2; (+) strand; PAM type: YTN; PAM sequence: CTC
tccagaacacagtgtcctct

SEQ ID NO: 403347 - DNA, 20 bp, Artificial Sequence
  Description of Artificial Sequence: Synthetic oligonucleotide
  Target: LAMA2; (+) strand; PAM type: YTN; PAM sequence: CTC
cagaacacagtgtcctcttc

SEQ ID NO: 403348 - DNA, 20 bp, Artificial Sequence
  Description of Artificial Sequence: Synthetic oligonucleotide
  Target: LAMA2; (+) strand; PAM type: YTN; PAM sequence: CTC
ttcatggagatacaatttga

SEQ ID NO: 403349 - DNA, 20 bp, Artificial Sequence
  Description of Artificial Sequence: Synthetic oligonucleotide
  Target: LAMA2; (+) strand; PAM type: YTN; PAM sequence: CTT
catggagatacaatttgatt

SEQ ID NO: 403350 - DNA, 20 bp, Artificial Sequence
  Description of Artificial Sequence: Synthetic oligonucleotide
  Target: LAMA2; (+) strand; PAM type: YTN; PAM sequence: TTC
atggagatacaatttgatta

SEQ ID NO: 403351 - DNA, 20 bp, Artificial Sequence
  Description of Artificial Sequence: Synthetic oligonucleotide
  Target: LAMA2; (+) strand; PAM type: YTN; PAM sequence: TTT
gattagcagatcaggtgagg

SEQ ID NO: 403352 - DNA, 20 bp, Artificial Sequence
  Description of Artificial Sequence: Synthetic oligonucleotide
  Target: LAMA2; (+) strand; PAM type: YTN; PAM sequence: TTG
attagcagatcaggtgaggc

SEQ ID NO: 403353 - DNA, 20 bp, Artificial Sequence
  Description of Artificial Sequence: Synthetic oligonucleotide
  Target: LAMA2; (+) strand; PAM type: YTN; PAM sequence: TTA
gcagatcaggtgaggcaaca

SEQ ID NO: 403354 - DNA, 20 bp, Artificial Sequence
  Description of Artificial Sequence: Synthetic oligonucleotide
  Target: LAMA2; (+) strand; PAM type: YTN; PAM sequence: CTT
atgcggtctgtgggagacgt

SEQ ID NO: 403355 - DNA, 20 bp, Artificial Sequence
  Description of Artificial Sequence: Synthetic oligonucleotide
  Target: LAMA2; (+) strand; PAM type: YTN; PAM sequence: TTA
tgcggtctgtgggagacgta

SEQ ID NO: 403356 - DNA, 20 bp, Artificial Sequence
  Description of Artificial Sequence: Synthetic oligonucleotide
  Target: LAMA2; (+) strand; PAM type: YTN; PAM sequence: CTG
tgggagacgtaacagatctt

SEQ ID NO: 403357 - DNA, 20 bp, Artificial Sequence
  Description of Artificial Sequence: Synthetic oligonucleotide
  Target: LAMA2; (+) strand; PAM type: YTN; PAM sequence: CTT
ctgtatccccagaaggtctc

SEQ ID NO: 403358 - DNA, 20 bp, Artificial Sequence
  Description of Artificial Sequence: Synthetic oligonucleotide
  Target: LAMA2; (+) strand; PAM type: YTN; PAM sequence: TTC
tgtatccccagaaggtctca

SEQ ID NO: 403359 - DNA, 20 bp, Artificial Sequence
  Description of Artificial Sequence: Synthetic oligonucleotide
  Target: LAMA2; (+) strand; PAM type: YTN; PAM sequence: CTG
tatccccagaaggtctcaaa

SEQ ID NO: 403360 - DNA, 20 bp, Artificial Sequence
  Description of Artificial Sequence: Synthetic oligonucleotide
  Target: LAMA2; (+) strand; PAM type: YTN; PAM sequence: CTC
aaatctatatgaatttacct

SEQ ID NO: 403361 - DNA, 20 bp, Artificial Sequence
  Description of Artificial Sequence: Synthetic oligonucleotide
  Target: LAMA2; (+) strand; PAM type: YTN; PAM sequence: CTA
tatgaatttacctattgcaa

SEQ ID NO: 403362 - DNA, 20 bp, Artificial Sequence
  Description of Artificial Sequence: Synthetic oligonucleotide
  Target: LAMA2; (+) strand; PAM type: YTN; PAM sequence: TTT
acctattgcaaaaatccctc

SEQ ID NO: 403363 - DNA, 20 bp, Artificial Sequence
  Description of Artificial Sequence: Synthetic oligonucleotide
  Target: LAMA2; (+) strand; PAM type: YTN; PAM sequence: TTA
cctattgcaaaaatccctct

SEQ ID NO: 403364 - DNA, 20 bp, Artificial Sequence
  Description of Artificial Sequence: Synthetic oligonucleotide
  Target: LAMA2; (+) strand; PAM type: YTN; PAM sequence: CTA
ttgcaaaaatccctctttag

SEQ ID NO: 403365 - DNA, 20 bp, Artificial Sequence
  Description of Artificial Sequence: Synthetic oligonucleotide
  Target: LAMA2; (+) strand; PAM type: YTN; PAM sequence: TTG
caaaaatccctctttagcct

SEQ ID NO: 403366 - DNA, 20 bp, Artificial Sequence
  Description of Artificial Sequence: Synthetic oligonucleotide
  Target: LAMA2; (+) strand; PAM type: YTN; PAM sequence: CTC
tttagccttctcttttgaat

SEQ ID NO: 403367 - DNA, 20 bp, Artificial Sequence
  Description of Artificial Sequence: Synthetic oligonucleotide
  Target: LAMA2; (+) strand; PAM type: YTN; PAM sequence: CTT
tagccttctcttttgaatcc

SEQ ID NO: 403368 - DNA, 20 bp, Artificial Sequence
  Description of Artificial Sequence: Synthetic oligonucleotide
  Target: LAMA2; (+) strand; PAM type: YTN; PAM sequence: TTT
agccttctcttttgaatcca

SEQ ID NO: 403369 - DNA, 20 bp, Artificial Sequence
  Description of Artificial Sequence: Synthetic oligonucleotide
  Target: LAMA2; (+) strand; PAM type: YTN; PAM sequence: TTA
gccttctcttttgaatccaa

SEQ ID NO: 403370 - DNA, 20 bp, Artificial Sequence
  Description of Artificial Sequence: Synthetic oligonucleotide
  Target: LAMA2; (+) strand; PAM type: YTN; PAM sequence: CTT
ctcttttgaatccaaccaat

SEQ ID NO: 403371 - DNA, 20 bp, Artificial Sequence
  Description of Artificial Sequence: Synthetic oligonucleotide
  Target: LAMA2; (+) strand; PAM type: YTN; PAM sequence: TTC
tcttttgaatccaaccaatt

SEQ ID NO: 403372 - DNA, 20 bp, Artificial Sequence
  Description of Artificial Sequence: Synthetic oligonucleotide
  Target: LAMA2; (+) strand; PAM type: YTN; PAM sequence: CTC
ttttgaatccaaccaatttg

SEQ ID NO: 403373 - DNA, 20 bp, Artificial Sequence
  Description of Artificial Sequence: Synthetic oligonucleotide
  Target: LAMA2; (+) strand; PAM type: YTN; PAM sequence: CTT
ttgaatccaaccaatttggc

SEQ ID NO: 403374 - DNA, 20 bp, Artificial Sequence
  Description of Artificial Sequence: Synthetic oligonucleotide
  Target: LAMA2; (+) strand; PAM type: YTN; PAM sequence: TTT
tgaatccaaccaatttggca

SEQ ID NO: 403375 - DNA, 20 bp, Artificial Sequence
  Description of Artificial Sequence: Synthetic oligonucleotide
  Target: LAMA2; (+) strand; PAM type: YTN; PAM sequence: TTT
gaatccaaccaatttggcac

SEQ ID NO: 403376 - DNA, 20 bp, Artificial Sequence
  Description of Artificial Sequence: Synthetic oligonucleotide
  Target: LAMA2; (+) strand; PAM type: YTN; PAM sequence: TTG
aatccaaccaatttggcacc

SEQ ID NO: 403377 - DNA, 20 bp, Artificial Sequence
  Description of Artificial Sequence: Synthetic oligonucleotide
  Target: LAMA2; (+) strand; PAM type: YTN; PAM sequence: TTT
ggcacccaacctttgcagta

SEQ ID NO: 403378 - DNA, 20 bp, Artificial Sequence
  Description of Artificial Sequence: Synthetic oligonucleotide
  Target: LAMA2; (+) strand; PAM type: YTN; PAM sequence: TTG
gcacccaacctttgcagtat

SEQ ID NO: 403379 - DNA, 20 bp, Artificial Sequence
  Description of Artificial Sequence: Synthetic oligonucleotide
  Target: LAMA2; (+) strand; PAM type: YTN; PAM sequence: CTT
tgcagtatacttgcatgacc

SEQ ID NO: 403380 - DNA, 20 bp, Artificial Sequence
  Description of Artificial Sequence: Synthetic oligonucleotide
  Target: LAMA2; (+) strand; PAM type: YTN; PAM sequence: TTT
gcagtatacttgcatgaccc

SEQ ID NO: 403381 - DNA, 20 bp, Artificial Sequence
  Description of Artificial Sequence: Synthetic oligonucleotide
  Target: LAMA2; (+) strand; PAM type: YTN; PAM sequence: TTG
cagtatacttgcatgaccct

SEQ ID NO: 403382 - DNA, 20 bp, Artificial Sequence
  Description of Artificial Sequence: Synthetic oligonucleotide
  Target: LAMA2; (+) strand; PAM type: YTN; PAM sequence: CTT
gcatgacccttggagaaggg

SEQ ID NO: 403383 - DNA, 20 bp, Artificial Sequence
  Description of Artificial Sequence: Synthetic oligonucleotide
  Target: LAMA2; (+) strand; PAM type: YTN; PAM sequence: TTG
catgacccttggagaagggc

SEQ ID NO: 403384 - DNA, 20 bp, Artificial Sequence
  Description of Artificial Sequence: Synthetic oligonucleotide
  Target: LAMA2; (+) strand; PAM type: YTN; PAM sequence: CTT
ggagaagggccacagttctg

SEQ ID NO: 403385 - DNA, 20 bp, Artificial Sequence
  Description of Artificial Sequence: Synthetic oligonucleotide
  Target: LAMA2; (+) strand; PAM type: YTN; PAM sequence: TTG
gagaagggccacagttctgc

SEQ ID NO: 403386 - DNA, 20 bp, Artificial Sequence
  Description of Artificial Sequence: Synthetic oligonucleotide
  Target: LAMA2; (+) strand; PAM type: YTN; PAM sequence: TTC
tgcccatactcaaacacaaa

SEQ ID NO: 403387 - DNA, 20 bp, Artificial Sequence
  Description of Artificial Sequence: Synthetic oligonucleotide
  Target: LAMA2; (+) strand; PAM type: YTN; PAM sequence: CTG
cccatactcaaacacaaatg

SEQ ID NO: 403388 - DNA, 20 bp, Artificial Sequence
  Description of Artificial Sequence: Synthetic oligonucleotide
  Target: LAMA2; (+) strand; PAM type: YTN; PAM sequence: CTC
aaacacaaatgaggctcttg

SEQ ID NO: 403389 - DNA, 20 bp, Artificial Sequence
  Description of Artificial Sequence: Synthetic oligonucleotide
  Target: LAMA2; (+) strand; PAM type: YTN; PAM sequence: CTC
ttggagacacctcctggtgt

SEQ ID NO: 403390 - DNA, 20 bp, Artificial Sequence
  Description of Artificial Sequence: Synthetic oligonucleotide
  Target: LAMA2; (+) strand; PAM type: YTN; PAM sequence: CTT
ggagacacctcctggtgtca

SEQ ID NO: 403391 - DNA, 20 bp, Artificial Sequence
  Description of Artificial Sequence: Synthetic oligonucleotide
  Target: LAMA2; (+) strand; PAM type: YTN; PAM sequence: TTG
gagacacctcctggtgtcat

SEQ ID NO: 403392 - DNA, 20 bp, Artificial Sequence
  Description of Artificial Sequence: Synthetic oligonucleotide
  Target: LAMA2; (+) strand; PAM type: YTN; PAM sequence: CTC
ctggtgtcatgatcatatgg

SEQ ID NO: 403393 - DNA, 20 bp, Artificial Sequence
  Description of Artificial Sequence: Synthetic oligonucleotide
  Target: LAMA2; (+) strand; PAM type: YTN; PAM sequence: CTG
gtgtcatgatcatatggagg

SEQ ID NO: 403394 - DNA, 20 bp, Artificial Sequence
  Description of Artificial Sequence: Synthetic oligonucleotide
  Target: LAMA2; (+) strand; PAM type: YTN; PAM sequence: CTG
ttttggtttctaggctatct

SEQ ID NO: 403395 - DNA, 20 bp, Artificial Sequence
  Description of Artificial Sequence: Synthetic oligonucleotide
  Target: LAMA2; (+) strand; PAM type: YTN; PAM sequence: TTT
tggtttctaggctatcttgt

SEQ ID NO: 403396 - DNA, 20 bp, Artificial Sequence
  Description of Artificial Sequence: Synthetic oligonucleotide
  Target: LAMA2; (+) strand; PAM type: YTN; PAM sequence: TTT
ggtttctaggctatcttgtt

SEQ ID NO: 403397 - DNA, 20 bp, Artificial Sequence
  Description of Artificial Sequence: Synthetic oligonucleotide
  Target: LAMA2; (+) strand; PAM type: YTN; PAM sequence: TTG
gtttctaggctatcttgttg

SEQ ID NO: 403398 - DNA, 20 bp, Artificial Sequence
  Description of Artificial Sequence: Synthetic oligonucleotide
  Target: LAMA2; (+) strand; PAM type: YTN; PAM sequence: TTT
ctaggctatcttgttgggag

SEQ ID NO: 403399 - DNA, 20 bp, Artificial Sequence
  Description of Artificial Sequence: Synthetic oligonucleotide
  Target: LAMA2; (+) strand; PAM type: YTN; PAM sequence: TTC
taggctatcttgttgggagt

SEQ ID NO: 403400 - DNA, 20 bp, Artificial Sequence
  Description of Artificial Sequence: Synthetic oligonucleotide
  Target: LAMA2; (+) strand; PAM type: YTN; PAM sequence: CTA
ggctatcttgttgggagtct

SEQ ID NO: 403401 - DNA, 20 bp, Artificial Sequence
  Description of Artificial Sequence: Synthetic oligonucleotide
  Target: LAMA2; (+) strand; PAM type: YTN; PAM sequence: CTA
tcttgttgggagtctgcaca

SEQ ID NO: 403402 - DNA, 20 bp, Artificial Sequence
  Description of Artificial Sequence: Synthetic oligonucleotide
  Target: LAMA2; (+) strand; PAM type: YTN; PAM sequence: CTT
gttgggagtctgcacagccc

SEQ ID NO: 403403 - DNA, 20 bp, Artificial Sequence
  Description of Artificial Sequence: Synthetic oligonucleotide
  Target: LAMA2; (+) strand; PAM type: YTN; PAM sequence: TTG
ttgggagtctgcacagccct

SEQ ID NO: 403404 - DNA, 20 bp, Artificial Sequence
  Description of Artificial Sequence: Synthetic oligonucleotide
  Target: LAMA2; (+) strand; PAM type: YTN; PAM sequence: TTG
ggagtctgcacagccctttc

SEQ ID NO: 403405 - DNA, 20 bp, Artificial Sequence
  Description of Artificial Sequence: Synthetic oligonucleotide
  Target: LAMA2; (+) strand; PAM type: YTN; PAM sequence: CTG
cacagccctttcatggaggt

SEQ ID NO: 403406 - DNA, 20 bp, Artificial Sequence
  Description of Artificial Sequence: Synthetic oligonucleotide
  Target: LAMA2; (+) strand; PAM type: YTN; PAM sequence: CTT
tcatggaggtaatgatgatg

SEQ ID NO: 403407 - DNA, 20 bp, Artificial Sequence
  Description of Artificial Sequence: Synthetic oligonucleotide
  Target: LAMA2; (+) strand; PAM type: YTN; PAM sequence: TTT
catggaggtaatgatgatgc

SEQ ID NO: 403408 - DNA, 20 bp, Artificial Sequence
  Description of Artificial Sequence: Synthetic oligonucleotide
  Target: LAMA2; (+) strand; PAM type: YTN; PAM sequence: TTC
atggaggtaatgatgatgct

SEQ ID NO: 403409 - DNA, 20 bp, Artificial Sequence
  Description of Artificial Sequence: Synthetic oligonucleotide
  Target: LAMA2; (+) strand; PAM type: YTN; PAM sequence: CTA
gttggttttcttccaaatgt

SEQ ID NO: 403410 - DNA, 20 bp, Artificial Sequence
  Description of Artificial Sequence: Synthetic oligonucleotide
  Target: LAMA2; (+) strand; PAM type: YTN; PAM sequence: TTG
gttttcttccaaatgtgcaa

SEQ ID NO: 403411 - DNA, 20 bp, Artificial Sequence
  Description of Artificial Sequence: Synthetic oligonucleotide
  Target: LAMA2; (+) strand; PAM type: YTN; PAM sequence: TTT
tcttccaaatgtgcaaatta

SEQ ID NO: 403412 - DNA, 20 bp, Artificial Sequence
  Description of Artificial Sequence: Synthetic oligonucleotide
  Target: LAMA2; (+) strand; PAM type: YTN; PAM sequence: TTT
cttccaaatgtgcaaattac

SEQ ID NO: 403413 - DNA, 20 bp, Artificial Sequence
  Description of Artificial Sequence: Synthetic oligonucleotide
  Target: LAMA2; (+) strand; PAM type: YTN; PAM sequence: TTC
ttccaaatgtgcaaattaca

SEQ ID NO: 403414 - DNA, 20 bp, Artificial Sequence
  Description of Artificial Sequence: Synthetic oligonucleotide
  Target: LAMA2; (+) strand; PAM type: YTN; PAM sequence: CTT
ccaaatgtgcaaattacatg

SEQ ID NO: 403415 - DNA, 20 bp, Artificial Sequence
  Description of Artificial Sequence: Synthetic oligonucleotide
  Target: LAMA2; (+) strand; PAM type: YTN; PAM sequence: TTC
caaatgtgcaaattacatga

SEQ ID NO: 403416 - DNA, 20 bp, Artificial Sequence
  Description of Artificial Sequence: Synthetic oligonucleotide
  Target: LAMA2; (+) strand; PAM type: YTN; PAM sequence: TTA
catgagtagcacaaaatgct

SEQ ID NO: 403417 - DNA, 20 bp, Artificial Sequence
  Description of Artificial Sequence: Synthetic oligonucleotide
  Target: LAMA2; (+) strand; PAM type: YTN; PAM sequence: CTA
gaagaaatgaaaaaatggaa

SEQ ID NO: 403418 - DNA, 20 bp, Artificial Sequence
  Description of Artificial Sequence: Synthetic oligonucleotide
  Target: LAMA2; (+) strand; PAM type: YTN; PAM sequence: TTC
actgctagtgaaggccaaga

SEQ ID NO: 403419 - DNA, 20 bp, Artificial Sequence
  Description of Artificial Sequence: Synthetic oligonucleotide
  Target: LAMA2; (+) strand; PAM type: YTN; PAM sequence: CTG
ctagtgaaggccaagagggc

SEQ ID NO: 403420 - DNA, 20 bp, Artificial Sequence
  Description of Artificial Sequence: Synthetic oligonucleotide
  Target: LAMA2; (+) strand; PAM type: YTN; PAM sequence: CTA
gtgaaggccaagagggcatt

SEQ ID NO: 403421 - DNA, 20 bp, Artificial Sequence
  Description of Artificial Sequence: Synthetic oligonucleotide
  Target: LAMA2; (+) strand; PAM type: YTN; PAM sequence: TTT
gaacaaatggcaaagagaga

SEQ ID NO: 403422 - DNA, 20 bp, Artificial Sequence
  Description of Artificial Sequence: Synthetic oligonucleotide
  Target: LAMA2; (+) strand; PAM type: YTN; PAM sequence: TTG
aacaaatggcaaagagagat

SEQ ID NO: 403423 - DNA, 20 bp, Artificial Sequence
  Description of Artificial Sequence: Synthetic oligonucleotide
  Target: LAMA2; (+) strand; PAM type: YTN; PAM sequence: TTT
tacatcttcccctctctctg

SEQ ID NO: 403424 - DNA, 20 bp, Artificial Sequence
  Description of Artificial Sequence: Synthetic oligonucleotide
  Target: LAMA2; (+) strand; PAM type: YTN; PAM sequence: TTT
acatcttcccctctctctgc

SEQ ID NO: 403425 - DNA, 20 bp, Artificial Sequence
  Description of Artificial Sequence: Synthetic oligonucleotide
  Target: LAMA2; (+) strand; PAM type: YTN; PAM sequence: TTA
catcttcccctctctctgcc

SEQ ID NO: 403426 - DNA, 20 bp, Artificial Sequence
  Description of Artificial Sequence: Synthetic oligonucleotide
  Target: LAMA2; (+) strand; PAM type: YTN; PAM sequence: CTT
cccctctctctgcctccttc

SEQ ID NO: 403427 - DNA, 20 bp, Artificial Sequence
  Description of Artificial Sequence: Synthetic oligonucleotide
  Target: LAMA2; (+) strand; PAM type: YTN; PAM sequence: TTC
ccctctctctgcctccttct

SEQ ID NO: 403428 - DNA, 20 bp, Artificial Sequence
  Description of Artificial Sequence: Synthetic oligonucleotide
  Target: LAMA2; (+) strand; PAM type: YTN; PAM sequence: CTC
tctctgcctccttctggagc

SEQ ID NO: 403429 - DNA, 20 bp, Artificial Sequence
  Description of Artificial Sequence: Synthetic oligonucleotide
  Target: LAMA2; (+) strand; PAM type: YTN; PAM sequence: CTC
tctgcctccttctggagcgc

SEQ ID NO: 403430 - DNA, 20 bp, Artificial Sequence
  Description of Artificial Sequence: Synthetic oligonucleotide
  Target: LAMA2; (+) strand; PAM type: YTN; PAM sequence: CTC
tgcctccttctggagcgcta

SEQ ID NO: 403431 - DNA, 20 bp, Artificial Sequence
  Description of Artificial Sequence: Synthetic oligonucleotide
  Target: LAMA2; (+) strand; PAM type: YTN; PAM sequence: CTG
cctccttctggagcgctatc

SEQ ID NO: 403432 - DNA, 20 bp, Artificial Sequence
  Description of Artificial Sequence: Synthetic oligonucleotide
  Target: LAMA2; (+) strand; PAM type: YTN; PAM sequence: CTC
cttctggagcgctatcaatg

SEQ ID NO: 403433 - DNA, 20 bp, Artificial Sequence
  Description of Artificial Sequence: Synthetic oligonucleotide
  Target: LAMA2; (+) strand; PAM type: YTN; PAM sequence: CTT
ctggagcgctatcaatgaac

SEQ ID NO: 403434 - DNA, 20 bp, Artificial Sequence
  Description of Artificial Sequence: Synthetic oligonucleotide
  Target: LAMA2; (+) strand; PAM type: YTN; PAM sequence: TTC
tggagcgctatcaatgaaca

SEQ ID NO: 403435 - DNA, 20 bp, Artificial Sequence
  Description of Artificial Sequence: Synthetic oligonucleotide
  Target: LAMA2; (+) strand; PAM type: YTN; PAM sequence: CTG
gagcgctatcaatgaacaaa

SEQ ID NO: 403436 - DNA, 20 bp, Artificial Sequence
  Description of Artificial Sequence: Synthetic oligonucleotide
  Target: LAMA2; (+) strand; PAM type: YTN; PAM sequence: CTA
tcaatgaacaaagttacaga

SEQ ID NO: 403437 - DNA, 20 bp, Artificial Sequence
  Description of Artificial Sequence: Synthetic oligonucleotide
  Target: LAMA2; (+) strand; PAM type: YTN; PAM sequence: TTA
cagattctctctgagtccaa

SEQ ID NO: 403438 - DNA, 20 bp, Artificial Sequence
  Description of Artificial Sequence: Synthetic oligonucleotide
  Target: LAMA2; (+) strand; PAM type: YTN; PAM sequence: TTC
tctctgagtccaagcaacta

SEQ ID NO: 403439 - DNA, 20 bp, Artificial Sequence
  Description of Artificial Sequence: Synthetic oligonucleotide
  Target: LAMA2; (+) strand; PAM type: YTN; PAM sequence: CTC
tctgagtccaagcaactatt

SEQ ID NO: 403440 - DNA, 20 bp, Artificial Sequence
  Description of Artificial Sequence: Synthetic oligonucleotide
  Target: LAMA2; (+) strand; PAM type: YTN; PAM sequence: CTC
tgagtccaagcaactatttt

SEQ ID NO: 403441 - DNA, 20 bp, Artificial Sequence
  Description of Artificial Sequence: Synthetic oligonucleotide
  Target: LAMA2; (+) strand; PAM type: YTN; PAM sequence: CTG
agtccaagcaactattttgc

SEQ ID NO: 403442 - DNA, 20 bp, Artificial Sequence
  Description of Artificial Sequence: Synthetic oligonucleotide
  Target: LAMA2; (+) strand; PAM type: YTN; PAM sequence: CTA
ttttgctatcctgaaagtaa

SEQ ID NO: 403443 - DNA, 20 bp, Artificial Sequence
  Description of Artificial Sequence: Synthetic oligonucleotide
  Target: LAMA2; (+) strand; PAM type: YTN; PAM sequence: TTT
tgctatcctgaaagtaaccc

SEQ ID NO: 403444 - DNA, 20 bp, Artificial Sequence
  Description of Artificial Sequence: Synthetic oligonucleotide
  Target: LAMA2; (+) strand; PAM type: YTN; PAM sequence: TTT
gctatcctgaaagtaaccct

SEQ ID NO: 403445 - DNA, 20 bp, Artificial Sequence
  Description of Artificial Sequence: Synthetic oligonucleotide
  Target: LAMA2; (+) strand; PAM type: YTN; PAM sequence: TTG
ctatcctgaaagtaaccctt

SEQ ID NO: 403446 - DNA, 20 bp, Artificial Sequence
  Description of Artificial Sequence: Synthetic oligonucleotide
  Target: LAMA2; (+) strand; PAM type: YTN; PAM sequence: CTA
tcctgaaagtaaccctttga

SEQ ID NO: 403447 - DNA, 20 bp, Artificial Sequence
  Description of Artificial Sequence: Synthetic oligonucleotide
  Target: LAMA2; (+) strand; PAM type: YTN; PAM sequence: CTG
aaagtaaccctttgatggtg

SEQ ID NO: 403448 - DNA, 20 bp, Artificial Sequence
  Description of Artificial Sequence: Synthetic oligonucleotide
  Target: LAMA2; (+) strand; PAM type: YTN; PAM sequence: CTT
tgatggtgattttccatctg

SEQ ID NO: 403449 - DNA, 20 bp, Artificial Sequence
  Description of Artificial Sequence: Synthetic oligonucleotide
  Target: LAMA2; (+) strand; PAM type: YTN; PAM sequence: TTT
gatggtgattttccatctga

SEQ ID NO: 403450 - DNA, 20 bp, Artificial Sequence
  Description of Artificial Sequence: Synthetic oligonucleotide
  Target: LAMA2; (+) strand; PAM type: YTN; PAM sequence: TTG
atggtgattttccatctgac

SEQ ID NO: 403451 - DNA, 20 bp, Artificial Sequence
  Description of Artificial Sequence: Synthetic oligonucleotide
  Target: LAMA2; (+) strand; PAM type: YTN; PAM sequence: TTT
tccatctgaccctacagaaa

SEQ ID NO: 403452 - DNA, 20 bp, Artificial Sequence
  Description of Artificial Sequence: Synthetic oligonucleotide
  Target: LAMA2; (+) strand; PAM type: YTN; PAM sequence: TTT
ccatctgaccctacagaaat

SEQ ID NO: 403453 - DNA, 20 bp, Artificial Sequence
  Description of Artificial Sequence: Synthetic oligonucleotide
  Target: LAMA2; (+) strand; PAM type: YTN; PAM sequence: TTC
catctgaccctacagaaatt

SEQ ID NO: 403454 - DNA, 20 bp, Artificial Sequence
  Description of Artificial Sequence: Synthetic oligonucleotide
  Target: LAMA2; (+) strand; PAM type: YTN; PAM sequence: CTG
accctacagaaattaaatca

SEQ ID NO: 403455 - DNA, 20 bp, Artificial Sequence
  Description of Artificial Sequence: Synthetic oligonucleotide
  Target: LAMA2; (+) strand; PAM type: YTN; PAM sequence: CTA
cagaaattaaatcaaataat

SEQ ID NO: 403456 - DNA, 20 bp, Artificial Sequence
  Description of Artificial Sequence: Synthetic oligonucleotide
  Target: LAMA2; (+) strand; PAM type: YTN; PAM sequence: TTA
aatcaaataatcaactagtg

SEQ ID NO: 403457 - DNA, 20 bp, Artificial Sequence
  Description of Artificial Sequence: Synthetic oligonucleotide
  Target: LAMA2; (+) strand; PAM type: YTN; PAM sequence: CTA
gtgttatttatgattgaagg

SEQ ID NO: 403458 - DNA, 20 bp, Artificial Sequence
  Description of Artificial Sequence: Synthetic oligonucleotide
  Target: LAMA2; (+) strand; PAM type: YTN; PAM sequence: TTA
tttatgattgaaggaaggct

SEQ ID NO: 403459 - DNA, 20 bp, Artificial Sequence
  Description of Artificial Sequence: Synthetic oligonucleotide
  Target: LAMA2; (+) strand; PAM type: YTN; PAM sequence: TTT
atgattgaaggaaggctctc

SEQ ID NO: 403460 - DNA, 20 bp, Artificial Sequence
  Description of Artificial Sequence: Synthetic oligonucleotide
  Target: LAMA2; (+) strand; PAM type: YTN; PAM sequence: TTA
tgattgaaggaaggctctct

SEQ ID NO: 403461 - DNA, 20 bp, Artificial Sequence
  Description of Artificial Sequence: Synthetic oligonucleotide
  Target: LAMA2; (+) strand; PAM type: YTN; PAM sequence: TTG
aaggaaggctctctaaatat

SEQ ID NO: 403462 - DNA, 20 bp, Artificial Sequence
  Description of Artificial Sequence: Synthetic oligonucleotide
  Target: LAMA2; (+) strand; PAM type: YTN; PAM sequence: CTC
tctaaatataagtaaaaatt

SEQ ID NO: 403463 - DNA, 20 bp, Artificial Sequence
  Description of Artificial Sequence: Synthetic oligonucleotide
  Target: LAMA2; (+) strand; PAM type: YTN; PAM sequence: CTC
taaatataagtaaaaattgg

SEQ ID NO: 403464 - DNA, 20 bp, Artificial Sequence
  Description of Artificial Sequence: Synthetic oligonucleotide
  Target: LAMA2; (+) strand; PAM type: YTN; PAM sequence: CTA
aatataagtaaaaattggta

SEQ ID NO: 403465 - DNA, 20 bp, Artificial Sequence
  Description of Artificial Sequence: Synthetic oligonucleotide
  Target: LAMA2; (+) strand; PAM type: YTN; PAM sequence: TTG
gtatgaacagtattactcta

SEQ ID NO: 403466 - DNA, 20 bp, Artificial Sequence
  Description of Artificial Sequence: Synthetic oligonucleotide
  Target: LAMA2; (+) strand; PAM type: YTN; PAM sequence: TTA
ctctattcatataggcattc

SEQ ID NO: 403467 - DNA, 20 bp, Artificial Sequence
  Description of Artificial Sequence: Synthetic oligonucleotide
  Target: LAMA2; (+) strand; PAM type: YTN; PAM sequence: CTC
tattcatataggcattcctt

SEQ ID NO: 403468 - DNA, 20 bp, Artificial Sequence
  Description of Artificial Sequence: Synthetic oligonucleotide
  Target: LAMA2; (+) strand; PAM type: YTN; PAM sequence: CTA
ttcatataggcattcctttt

SEQ ID NO: 403469 - DNA, 20 bp, Artificial Sequence
  Description of Artificial Sequence: Synthetic oligonucleotide
  Target: LAMA2; (+) strand; PAM type: YTN; PAM sequence: TTC
atataggcattcctttttta

SEQ ID NO: 403470 - DNA, 20 bp, Artificial Sequence
  Description of Artificial Sequence: Synthetic oligonucleotide
  Target: LAMA2; (+) strand; PAM type: YTN; PAM sequence: TTC
cttttttagcaatttatagt

SEQ ID NO: 403471 - DNA, 20 bp, Artificial Sequence
  Description of Artificial Sequence: Synthetic oligonucleotide
  Target: LAMA2; (+) strand; PAM type: YTN; PAM sequence: CTT
ttttagcaatttatagtaat

SEQ ID NO: 403472 - DNA, 20 bp, Artificial Sequence
  Description of Artificial Sequence: Synthetic oligonucleotide
  Target: LAMA2; (+) strand; PAM type: YTN; PAM sequence: TTT
tttagcaatttatagtaatt

SEQ ID NO: 403473 - DNA, 20 bp, Artificial Sequence
  Description of Artificial Sequence: Synthetic oligonucleotide
  Target: LAMA2; (+) strand; PAM type: YTN; PAM sequence: TTT
ttagcaatttatagtaattt

SEQ ID NO: 403474 - DNA, 20 bp, Artificial Sequence
  Description of Artificial Sequence: Synthetic oligonucleotide
  Target: LAMA2; (+) strand; PAM type: YTN; PAM sequence: TTT
tagcaatttatagtaatttt

SEQ ID NO: 403475 - DNA, 20 bp, Artificial Sequence
  Description of Artificial Sequence: Synthetic oligonucleotide
  Target: LAMA2; (+) strand; PAM type: YTN; PAM sequence: TTT
agcaatttatagtaattttt

SEQ ID NO: 403476 - DNA, 20 bp, Artificial Sequence
  Description of Artificial Sequence: Synthetic oligonucleotide
  Target: LAMA2; (+) strand; PAM type: YTN; PAM sequence: TTA
gcaatttatagtaattttta

SEQ ID NO: 403477 - DNA, 20 bp, Artificial Sequence
  Description of Artificial Sequence: Synthetic oligonucleotide
  Target: LAMA2; (+) strand; PAM type: YTN; PAM sequence: TTT
atagtaatttttaaggtatt

SEQ ID NO: 403478 - DNA, 20 bp, Artificial Sequence
  Description of Artificial Sequence: Synthetic oligonucleotide
  Target: LAMA2; (+) strand; PAM type: YTN; PAM sequence: TTA
tagtaatttttaaggtatta

SEQ ID NO: 403479 - DNA, 20 bp, Artificial Sequence
  Description of Artificial Sequence: Synthetic oligonucleotide
  Target: LAMA2; (+) strand; PAM type: YTN; PAM sequence: TTT
ttaaggtattattcaaaaga

SEQ ID NO: 403480 - DNA, 20 bp, Artificial Sequence
  Description of Artificial Sequence: Synthetic oligonucleotide
  Target: LAMA2; (+) strand; PAM type: YTN; PAM sequence: TTT
taaggtattattcaaaagaa

SEQ ID NO: 403481 - DNA, 20 bp, Artificial Sequence
  Description of Artificial Sequence: Synthetic oligonucleotide
  Target: LAMA2; (+) strand; PAM type: YTN; PAM sequence: TTT
aaggtattattcaaaagaaa

SEQ ID NO: 403482 - DNA, 20 bp, Artificial Sequence
  Description of Artificial Sequence: Synthetic oligonucleotide
  Target: LAMA2; (+) strand; PAM type: YTN; PAM sequence: TTA
aggtattattcaaaagaaaa

SEQ ID NO: 403483 - DNA, 20 bp, Artificial Sequence
  Description of Artificial Sequence: Synthetic oligonucleotide
  Target: LAMA2; (+) strand; PAM type: YTN; PAM sequence: TTA
ttcaaaagaaaagggagctg

SEQ ID NO: 403484 - DNA, 20 bp, Artificial Sequence
  Description of Artificial Sequence: Synthetic oligonucleotide
  Target: LAMA2; (+) strand; PAM type: YTN; PAM sequence: TTC
aaaagaaaagggagctgtta

SEQ ID NO: 403485 - DNA, 20 bp, Artificial Sequence
  Description of Artificial Sequence: Synthetic oligonucleotide
  Target: LAMA2; (+) strand; PAM type: YTN; PAM sequence: CTG
ttaaatacattaatagtgat

SEQ ID NO: 403486 - DNA, 20 bp, Artificial Sequence
  Description of Artificial Sequence: Synthetic oligonucleotide
  Target: LAMA2; (+) strand; PAM type: YTN; PAM sequence: TTA
aatacattaatagtgatagc

SEQ ID NO: 403487 - DNA, 20 bp, Artificial Sequence
  Description of Artificial Sequence: Synthetic oligonucleotide
  Target: LAMA2; (+) strand; PAM type: YTN; PAM sequence: TTA
atagtgatagccattggaaa

SEQ ID NO: 403488 - DNA, 20 bp, Artificial Sequence
  Description of Artificial Sequence: Synthetic oligonucleotide
  Target: LAMA2; (+) strand; PAM type: YTN; PAM sequence: TTG
gaaattatttccatttcatt

SEQ ID NO: 403489 - DNA, 20 bp, Artificial Sequence
  Description of Artificial Sequence: Synthetic oligonucleotide
  Target: LAMA2; (+) strand; PAM type: YTN; PAM sequence: TTA
tttccatttcatttcctgac

SEQ ID NO: 403490 - DNA, 20 bp, Artificial Sequence
  Description of Artificial Sequence: Synthetic oligonucleotide
  Target: LAMA2; (+) strand; PAM type: YTN; PAM sequence: TTT
ccatttcatttcctgacaac

SEQ ID NO: 403491 - DNA, 20 bp, Artificial Sequence
  Description of Artificial Sequence: Synthetic oligonucleotide
  Target: LAMA2; (+) strand; PAM type: YTN; PAM sequence: TTC
catttcatttcctgacaact

SEQ ID NO: 403492 - DNA, 20 bp, Artificial Sequence
  Description of Artificial Sequence: Synthetic oligonucleotide
  Target: LAMA2; (+) strand; PAM type: YTN; PAM sequence: TTT
catttcctgacaacttcatg

SEQ ID NO: 403493 - DNA, 20 bp, Artificial Sequence
  Description of Artificial Sequence: Synthetic oligonucleotide
  Target: LAMA2; (+) strand; PAM type: YTN; PAM sequence: TTC
atttcctgacaacttcatga

SEQ ID NO: 403494 - DNA, 20 bp, Artificial Sequence
  Description of Artificial Sequence: Synthetic oligonucleotide
  Target: LAMA2; (+) strand; PAM type: YTN; PAM sequence: TTT
cctgacaacttcatgaaaag

SEQ ID NO: 403495 - DNA, 20 bp, Artificial Sequence
  Description of Artificial Sequence: Synthetic oligonucleotide
  Target: LAMA2; (+) strand; PAM type: YTN; PAM sequence: TTC
ctgacaacttcatgaaaagg

SEQ ID NO: 403496 - DNA, 20 bp, Artificial Sequence
  Description of Artificial Sequence: Synthetic oligonucleotide
  Target: LAMA2; (+) strand; PAM type: YTN; PAM sequence: CTG
acaacttcatgaaaaggtac

SEQ ID NO: 403497 - DNA, 20 bp, Artificial Sequence
  Description of Artificial Sequence: Synthetic oligonucleotide
  Target: LAMA2; (+) strand; PAM type: YTN; PAM sequence: CTT
catgaaaaggtacaatttat

SEQ ID NO: 403498 - DNA, 20 bp, Artificial Sequence
  Description of Artificial Sequence: Synthetic oligonucleotide
  Target: LAMA2; (+) strand; PAM type: YTN; PAM sequence: TTC
atgaaaaggtacaatttatt

SEQ ID NO: 403499 - DNA, 20 bp, Artificial Sequence
  Description of Artificial Sequence: Synthetic oligonucleotide
  Target: LAMA2; (+) strand; PAM type: YTN; PAM sequence: TTT
attctgaaatgtatgttctg

SEQ ID NO: 403500 - DNA, 20 bp, Artificial Sequence
  Description of Artificial Sequence: Synthetic oligonucleotide
  Target: LAMA2; (+) strand; PAM type: YTN; PAM sequence: TTA
ttctgaaatgtatgttctga

SEQ ID NO: 403501 - DNA, 20 bp, Artificial Sequence
  Description of Artificial Sequence: Synthetic oligonucleotide
  Target: LAMA2; (+) strand; PAM type: YTN; PAM sequence: TTC
tgaaatgtatgttctgagta

SEQ ID NO: 403502 - DNA, 20 bp, Artificial Sequence
  Description of Artificial Sequence: Synthetic oligonucleotide
  Target: LAMA2; (+) strand; PAM type: YTN; PAM sequence: CTG
aaatgtatgttctgagtaga

SEQ ID NO: 403503 - DNA, 20 bp, Artificial Sequence
  Description of Artificial Sequence: Synthetic oligonucleotide
  Target: LAMA2; (+) strand; PAM type: YTN; PAM sequence: TTC
tgagtagaatgattaatatt

SEQ ID NO: 403504 - DNA, 20 bp, Artificial Sequence
  Description of Artificial Sequence: Synthetic oligonucleotide
  Target: LAMA2; (+) strand; PAM type: YTN; PAM sequence: CTG
agtagaatgattaatattct

SEQ ID NO: 403505 - DNA, 20 bp, Artificial Sequence
  Description of Artificial Sequence: Synthetic oligonucleotide
  Target: LAMA2; (+) strand; PAM type: YTN; PAM sequence: TTA
atattcttcttattgttaga

SEQ ID NO: 403506 - DNA, 20 bp, Artificial Sequence
  Description of Artificial Sequence: Synthetic oligonucleotide
  Target: LAMA2; (+) strand; PAM type: YTN; PAM sequence: TTC
ttcttattgttagaacatct

SEQ ID NO: 403507 - DNA, 20 bp, Artificial Sequence
  Description of Artificial Sequence: Synthetic oligonucleotide
  Target: LAMA2; (+) strand; PAM type: YTN; PAM sequence: CTT
cttattgttagaacatctag

SEQ ID NO: 403508 - DNA, 20 bp, Artificial Sequence
  Description of Artificial Sequence: Synthetic oligonucleotide
  Target: LAMA2; (+) strand; PAM type: YTN; PAM sequence: TTC
ttattgttagaacatctaga

SEQ ID NO: 403509 - DNA, 20 bp, Artificial Sequence
  Description of Artificial Sequence: Synthetic oligonucleotide
  Target: LAMA2; (+) strand; PAM type: YTN; PAM sequence: CTT
attgttagaacatctagaac

SEQ ID NO: 403510 - DNA, 20 bp, Artificial Sequence
  Description of Artificial Sequence: Synthetic oligonucleotide
  Target: LAMA2; (+) strand; PAM type: YTN; PAM sequence: TTA
ttgttagaacatctagaaca

SEQ ID NO: 403511 - DNA, 20 bp, Artificial Sequence
  Description of Artificial Sequence: Synthetic oligonucleotide
  Target: LAMA2; (+) strand; PAM type: YTN; PAM sequence: TTG
ttagaacatctagaacaaaa

SEQ ID NO: 403512 - DNA, 20 bp, Artificial Sequence
  Description of Artificial Sequence: Synthetic oligonucleotide
  Target: LAMA2; (+) strand; PAM type: YTN; PAM sequence: TTA
gaacatctagaacaaaatct

SEQ ID NO: 403513 - DNA, 20 bp, Artificial Sequence
  Description of Artificial Sequence: Synthetic oligonucleotide
  Target: LAMA2; (+) strand; PAM type: YTN; PAM sequence: CTA
gaacaaaatctatttgtcct

SEQ ID NO: 403514 - DNA, 20 bp, Artificial Sequence
  Description of Artificial Sequence: Synthetic oligonucleotide
  Target: LAMA2; (+) strand; PAM type: YTN; PAM sequence: CTA
tttgtcctctttcaactgta

SEQ ID NO: 403515 - DNA, 20 bp, Artificial Sequence
  Description of Artificial Sequence: Synthetic oligonucleotide
  Target: LAMA2; (+) strand; PAM type: YTN; PAM sequence: TTT
gtcctctttcaactgtaaga

SEQ ID NO: 403516 - DNA, 20 bp, Artificial Sequence
  Description of Artificial Sequence: Synthetic oligonucleotide
  Target: LAMA2; (+) strand; PAM type: YTN; PAM sequence: TTG
tcctctttcaactgtaagag

SEQ ID NO: 403517 - DNA, 20 bp, Artificial Sequence
  Description of Artificial Sequence: Synthetic oligonucleotide
  Target: LAMA2; (+) strand; PAM type: YTN; PAM sequence: CTC
tttcaactgtaagagtatag

SEQ ID NO: 403518 - DNA, 20 bp, Artificial Sequence
  Description of Artificial Sequence: Synthetic oligonucleotide
  Target: LAMA2; (+) strand; PAM type: YTN; PAM sequence: CTT
tcaactgtaagagtatagga

SEQ ID NO: 403519 - DNA, 20 bp, Artificial Sequence
  Description of Artificial Sequence: Synthetic oligonucleotide
  Target: LAMA2; (+) strand; PAM type: YTN; PAM sequence: TTT
caactgtaagagtataggag

SEQ ID NO: 403520 - DNA, 20 bp, Artificial Sequence
  Description of Artificial Sequence: Synthetic oligonucleotide
  Target: LAMA2; (+) strand; PAM type: YTN; PAM sequence: TTC
aactgtaagagtataggagg

SEQ ID NO: 403521 - DNA, 20 bp, Artificial Sequence
  Description of Artificial Sequence: Synthetic oligonucleotide
  Target: LAMA2; (+) strand; PAM type: YTN; PAM sequence: CTG
taagagtataggagggttgg

SEQ ID NO: 403522 - DNA, 20 bp, Artificial Sequence
  Description of Artificial Sequence: Synthetic oligonucleotide
  Target: LAMA2; (+) strand; PAM type: YTN; PAM sequence: TTG
gtaatttcctcttgaaaact

SEQ ID NO: 403523 - DNA, 20 bp, Artificial Sequence
  Description of Artificial Sequence: Synthetic oligonucleotide
  Target: LAMA2; (+) strand; PAM type: YTN; PAM sequence: TTT
cctcttgaaaactaaaagaa

SEQ ID NO: 403524 - DNA, 20 bp, Artificial Sequence
  Description of Artificial Sequence: Synthetic oligonucleotide
  Target: LAMA2; (+) strand; PAM type: YTN; PAM sequence: TTC
ctcttgaaaactaaaagaaa

SEQ ID NO: 403525 - DNA, 20 bp, Artificial Sequence
  Description of Artificial Sequence: Synthetic oligonucleotide
  Target: LAMA2; (+) strand; PAM type: YTN; PAM sequence: CTC
ttgaaaactaaaagaaaaat

SEQ ID NO: 403526 - DNA, 20 bp, Artificial Sequence
  Description of Artificial Sequence: Synthetic oligonucleotide
  Target: LAMA2; (+) strand; PAM type: YTN; PAM sequence: CTT
gaaaactaaaagaaaaatag

SEQ ID NO: 403527 - DNA, 20 bp, Artificial Sequence
  Description of Artificial Sequence: Synthetic oligonucleotide
  Target: LAMA2; (+) strand; PAM type: YTN; PAM sequence: TTG
aaaactaaaagaaaaatagt

SEQ ID NO: 403528 - DNA, 20 bp, Artificial Sequence
  Description of Artificial Sequence: Synthetic oligonucleotide
  Target: LAMA2; (+) strand; PAM type: YTN; PAM sequence: CTA
aaagaaaaatagtttcttag

SEQ ID NO: 403529 - DNA, 20 bp, Artificial Sequence
  Description of Artificial Sequence: Synthetic oligonucleotide
  Target: LAMA2; (+) strand; PAM type: YTN; PAM sequence: TTT
cttagtttaagtgataccaa

SEQ ID NO: 403530 - DNA, 20 bp, Artificial Sequence
  Description of Artificial Sequence: Synthetic oligonucleotide
  Target: LAMA2; (+) strand; PAM type: YTN; PAM sequence: TTC
ttagtttaagtgataccaaa

SEQ ID NO: 403531 - DNA, 20 bp, Artificial Sequence
  Description of Artificial Sequence: Synthetic oligonucleotide
  Target: LAMA2; (+) strand; PAM type: YTN; PAM sequence: CTT
agtttaagtgataccaaaac

SEQ ID NO: 403532 - DNA, 20 bp, Artificial Sequence
  Description of Artificial Sequence: Synthetic oligonucleotide
  Target: LAMA2; (+) strand; PAM type: YTN; PAM sequence: TTA
gtttaagtgataccaaaacc

SEQ ID NO: 403533 - DNA, 20 bp, Artificial Sequence
  Description of Artificial Sequence: Synthetic oligonucleotide
  Target: LAMA2; (+) strand; PAM type: YTN; PAM sequence: TTT
aagtgataccaaaaccgctg

SEQ ID NO: 403534 - DNA, 20 bp, Artificial Sequence
  Description of Artificial Sequence: Synthetic oligonucleotide
  Target: LAMA2; (+) strand; PAM type: YTN; PAM sequence: TTA
agtgataccaaaaccgctga

SEQ ID NO: 403535 - DNA, 20 bp, Artificial Sequence
  Description of Artificial Sequence: Synthetic oligonucleotide
  Target: LAMA2; (+) strand; PAM type: YTN; PAM sequence: CTG
aaatttcaattgtaaaattt

SEQ ID NO: 403536 - DNA, 20 bp, Artificial Sequence
  Description of Artificial Sequence: Synthetic oligonucleotide
  Target: LAMA2; (+) strand; PAM type: YTN; PAM sequence: TTT
caattgtaaaatttcattaa

SEQ ID NO: 403537 - DNA, 20 bp, Artificial Sequence
  Description of Artificial Sequence: Synthetic oligonucleotide
  Target: LAMA2; (+) strand; PAM type: YTN; PAM sequence: TTC
aattgtaaaatttcattaaa

SEQ ID NO: 403538 - DNA, 20 bp, Artificial Sequence
  Description of Artificial Sequence: Synthetic oligonucleotide
  Target: LAMA2; (+) strand; PAM type: YTN; PAM sequence: TTG
taaaatttcattaaacaacc

SEQ ID NO: 403539 - DNA, 20 bp, Artificial Sequence
  Description of Artificial Sequence: Synthetic oligonucleotide
  Target: LAMA2; (+) strand; PAM type: YTN; PAM sequence: TTT
cattaaacaaccttaatgaa

SEQ ID NO: 403540 - DNA, 20 bp, Artificial Sequence
  Description of Artificial Sequence: Synthetic oligonucleotide
  Target: LAMA2; (+) strand; PAM type: YTN; PAM sequence: TTC
attaaacaaccttaatgaag

SEQ ID NO: 403541 - DNA, 20 bp, Artificial Sequence
  Description of Artificial Sequence: Synthetic oligonucleotide
  Target: LAMA2; (+) strand; PAM type: YTN; PAM sequence: TTA
aacaaccttaatgaaggtca

SEQ ID NO: 403542 - DNA, 20 bp, Artificial Sequence
  Description of Artificial Sequence: Synthetic oligonucleotide
  Target: LAMA2; (+) strand; PAM type: YTN; PAM sequence: CTT
aatgaaggtcattctcatta

SEQ ID NO: 403543 - DNA, 20 bp, Artificial Sequence
  Description of Artificial Sequence: Synthetic oligonucleotide
  Target: LAMA2; (+) strand; PAM type: YTN; PAM sequence: TTA
atgaaggtcattctcattag

SEQ ID NO: 403544 - DNA, 20 bp, Artificial Sequence
  Description of Artificial Sequence: Synthetic oligonucleotide
  Target: LAMA2; (+) strand; PAM type: YTN; PAM sequence: TTC
tcattagctccatgtaaaat

SEQ ID NO: 403545 - DNA, 20 bp, Artificial Sequence
  Description of Artificial Sequence: Synthetic oligonucleotide
  Target: LAMA2; (+) strand; PAM type: YTN; PAM sequence: CTC
attagctccatgtaaaatca

SEQ ID NO: 403546 - DNA, 20 bp, Artificial Sequence
  Description of Artificial Sequence: Synthetic oligonucleotide
  Target: LAMA2; (+) strand; PAM type: YTN; PAM sequence: TTA
gctccatgtaaaatcacctg

SEQ ID NO: 403547 - DNA, 20 bp, Artificial Sequence
  Description of Artificial Sequence: Synthetic oligonucleotide
  Target: LAMA2; (+) strand; PAM type: YTN; PAM sequence: CTC
catgtaaaatcacctgccta

SEQ ID NO: 403548 - DNA, 20 bp, Artificial Sequence
  Description of Artificial Sequence: Synthetic oligonucleotide
  Target: LAMA2; (+) strand; PAM type: YTN; PAM sequence: CTG
cctaaaacgttcccatattg

SEQ ID NO: 403549 - DNA, 20 bp, Artificial Sequence
  Description of Artificial Sequence: Synthetic oligonucleotide
  Target: LAMA2; (+) strand; PAM type: YTN; PAM sequence: CTA
aaacgttcccatattgataa

SEQ ID NO: 403550 - DNA, 20 bp, Artificial Sequence
  Description of Artificial Sequence: Synthetic oligonucleotide
  Target: LAMA2; (+) strand; PAM type: YTN; PAM sequence: TTC
ccatattgataatggagaaa

SEQ ID NO: 403551 - DNA, 20 bp, Artificial Sequence
  Description of Artificial Sequence: Synthetic oligonucleotide
  Target: LAMA2; (+) strand; PAM type: YTN; PAM sequence: TTG
ataatggagaaatgtatgac

SEQ ID NO: 403552 - DNA, 20 bp, Artificial Sequence
  Description of Artificial Sequence: Synthetic oligonucleotide
  Target: LAMA2; (+) strand; PAM type: YTN; PAM sequence: TTA
gaagtttgttagttgcatgc

SEQ ID NO: 403553 - DNA, 20 bp, Artificial Sequence
  Description of Artificial Sequence: Synthetic oligonucleotide
  Target: LAMA2; (+) strand; PAM type: YTN; PAM sequence: TTT
gttagttgcatgcttcaaaa

SEQ ID NO: 403554 - DNA, 20 bp, Artificial Sequence
  Description of Artificial Sequence: Synthetic oligonucleotide
  Target: LAMA2; (+) strand; PAM type: YTN; PAM sequence: TTG
ttagttgcatgcttcaaaaa

SEQ ID NO: 403555 - DNA, 20 bp, Artificial Sequence
  Description of Artificial Sequence: Synthetic oligonucleotide
  Target: LAMA2; (+) strand; PAM type: YTN; PAM sequence: TTA
gttgcatgcttcaaaaaata

SEQ ID NO: 403556 - DNA, 20 bp, Artificial Sequence
  Description of Artificial Sequence: Synthetic oligonucleotide
  Target: LAMA2; (+) strand; PAM type: YTN; PAM sequence: TTG
catgcttcaaaaaatagtat

SEQ ID NO: 403557 - DNA, 20 bp, Artificial Sequence
  Description of Artificial Sequence: Synthetic oligonucleotide
  Target: LAMA2; (+) strand; PAM type: YTN; PAM sequence: CTT
caaaaaatagtatgctaaca

SEQ ID NO: 403558 - DNA, 20 bp, Artificial Sequence
  Description of Artificial Sequence: Synthetic oligonucleotide
  Target: LAMA2; (+) strand; PAM type: YTN; PAM sequence: TTC
aaaaaatagtatgctaacaa

SEQ ID NO: 403559 - DNA, 20 bp, Artificial Sequence
  Description of Artificial Sequence: Synthetic oligonucleotide
  Target: LAMA2; (+) strand; PAM type: YTN; PAM sequence: CTA
acaagacatggaactgtgaa

SEQ ID NO: 403560 - DNA, 20 bp, Artificial Sequence
  Description of Artificial Sequence: Synthetic oligonucleotide
  Target: LAMA2; (+) strand; PAM type: YTN; PAM sequence: CTG
tgaacagctcatagtcaaaa

SEQ ID NO: 403561 - DNA, 20 bp, Artificial Sequence
  Description of Artificial Sequence: Synthetic oligonucleotide
  Target: LAMA2; (+) strand; PAM type: YTN; PAM sequence: CTC
atagtcaaaattctagtgga

SEQ ID NO: 403562 - DNA, 20 bp, Artificial Sequence
  Description of Artificial Sequence: Synthetic oligonucleotide
  Target: LAMA2; (+) strand; PAM type: YTN; PAM sequence: TTC
tagtggaaaactgctcttct

SEQ ID NO: 403563 - DNA, 20 bp, Artificial Sequence
  Description of Artificial Sequence: Synthetic oligonucleotide
  Target: LAMA2; (+) strand; PAM type: YTN; PAM sequence: CTA
gtggaaaactgctcttctgt

SEQ ID NO: 403564 - DNA, 20 bp, Artificial Sequence
  Description of Artificial Sequence: Synthetic oligonucleotide
  Target: LAMA2; (+) strand; PAM type: YTN; PAM sequence: CTG
ctcttctgtgccctcattaa

SEQ ID NO: 403565 - DNA, 20 bp, Artificial Sequence
  Description of Artificial Sequence: Synthetic oligonucleotide
  Target: LAMA2; (+) strand; PAM type: YTN; PAM sequence: CTC
ttctgtgccctcattaatga

SEQ ID NO: 403566 - DNA, 20 bp, Artificial Sequence
  Description of Artificial Sequence: Synthetic oligonucleotide
  Target: LAMA2; (+) strand; PAM type: YTN; PAM sequence: CTT
ctgtgccctcattaatgagt

SEQ ID NO: 403567 - DNA, 20 bp, Artificial Sequence
  Description of Artificial Sequence: Synthetic oligonucleotide
  Target: LAMA2; (+) strand; PAM type: YTN; PAM sequence: TTC
tgtgccctcattaatgagta

SEQ ID NO: 403568 - DNA, 20 bp, Artificial Sequence
  Description of Artificial Sequence: Synthetic oligonucleotide
  Target: LAMA2; (+) strand; PAM type: YTN; PAM sequence: CTG
tgccctcattaatgagtata

SEQ ID NO: 403569 - DNA, 20 bp, Artificial Sequence
  Description of Artificial Sequence: Synthetic oligonucleotide
  Target: LAMA2; (+) strand; PAM type: YTN; PAM sequence: CTC
attaatgagtataatggtgt

SEQ ID NO: 403570 - DNA, 20 bp, Artificial Sequence
  Description of Artificial Sequence: Synthetic oligonucleotide
  Target: LAMA2; (+) strand; PAM type: YTN; PAM sequence: TTA
atgagtataatggtgtctgc

SEQ ID NO: 403571 - DNA, 20 bp, Artificial Sequence
  Description of Artificial Sequence: Synthetic oligonucleotide
  Target: LAMA2; (+) strand; PAM type: YTN; PAM sequence: CTG
catatgggtgtttaatgata

SEQ ID NO: 403572 - DNA, 20 bp, Artificial Sequence
  Description of Artificial Sequence: Synthetic oligonucleotide
  Target: LAMA2; (+) strand; PAM type: YTN; PAM sequence: TTT
aatgatagtatttgatgata

SEQ ID NO: 403573 - DNA, 20 bp, Artificial Sequence
  Description of Artificial Sequence: Synthetic oligonucleotide
  Target: LAMA2; (+) strand; PAM type: YTN; PAM sequence: TTA
atgatagtatttgatgatag

SEQ ID NO: 403574 - DNA, 20 bp, Artificial Sequence
  Description of Artificial Sequence: Synthetic oligonucleotide
  Target: LAMA2; (+) strand; PAM type: YTN; PAM sequence: TTT
gatgatagaaaataacttca

SEQ ID NO: 403575 - DNA, 20 bp, Artificial Sequence
  Description of Artificial Sequence: Synthetic oligonucleotide
  Target: LAMA2; (+) strand; PAM type: YTN; PAM sequence: TTG
atgatagaaaataacttcaa

SEQ ID NO: 403576 - DNA, 20 bp, Artificial Sequence
  Description of Artificial Sequence: Synthetic oligonucleotide
  Target: LAMA2; (+) strand; PAM type: YTN; PAM sequence: CTT
caaagaagaaacgatgatgg

SEQ ID NO: 403577 - DNA, 20 bp, Artificial Sequence
  Description of Artificial Sequence: Synthetic oligonucleotide
  Target: LAMA2; (+) strand; PAM type: YTN; PAM sequence: TTC
aaagaagaaacgatgatggc

SEQ ID NO: 403578 - DNA, 20 bp, Artificial Sequence
  Description of Artificial Sequence: Synthetic oligonucleotide
  Target: LAMA2; (+) strand; PAM type: YTN; PAM sequence: CTT
tgtggttgtatggaagctac

SEQ ID NO: 403579 - DNA, 20 bp, Artificial Sequence
  Description of Artificial Sequence: Synthetic oligonucleotide
  Target: LAMA2; (+) strand; PAM type: YTN; PAM sequence: TTT
gtggttgtatggaagctact

SEQ ID NO: 403580 - DNA, 20 bp, Artificial Sequence
  Description of Artificial Sequence: Synthetic oligonucleotide
  Target: LAMA2; (+) strand; PAM type: YTN; PAM sequence: TTG
tggttgtatggaagctactt

SEQ ID NO: 403581 - DNA, 20 bp, Artificial Sequence
  Description of Artificial Sequence: Synthetic oligonucleotide
  Target: LAMA2; (+) strand; PAM type: YTN; PAM sequence: TTG
tatggaagctacttcaaact

SEQ ID NO: 403582 - DNA, 20 bp, Artificial Sequence
  Description of Artificial Sequence: Synthetic oligonucleotide
  Target: LAMA2; (+) strand; PAM type: YTN; PAM sequence: CTA
cttcaaactttctgagagat

SEQ ID NO: 403583 - DNA, 20 bp, Artificial Sequence
  Description of Artificial Sequence: Synthetic oligonucleotide
  Target: LAMA2; (+) strand; PAM type: YTN; PAM sequence: CTT
caaactttctgagagattta

SEQ ID NO: 403584 - DNA, 20 bp, Artificial Sequence
  Description of Artificial Sequence: Synthetic oligonucleotide
  Target: LAMA2; (+) strand; PAM type: YTN; PAM sequence: TTC
aaactttctgagagatttac

SEQ ID NO: 403585 - DNA, 20 bp, Artificial Sequence
  Description of Artificial Sequence: Synthetic oligonucleotide
  Target: LAMA2; (+) strand; PAM type: YTN; PAM sequence: CTT
tctgagagatttactcttgg

SEQ ID NO: 403586 - DNA, 20 bp, Artificial Sequence
  Description of Artificial Sequence: Synthetic oligonucleotide
  Target: LAMA2; (+) strand; PAM type: YTN; PAM sequence: TTT
ctgagagatttactcttggt

SEQ ID NO: 403587 - DNA, 20 bp, Artificial Sequence
  Description of Artificial Sequence: Synthetic oligonucleotide
  Target: LAMA2; (+) strand; PAM type: YTN; PAM sequence: TTC
tgagagatttactcttggtt

SEQ ID NO: 403588 - DNA, 20 bp, Artificial Sequence
  Description of Artificial Sequence: Synthetic oligonucleotide
  Target: LAMA2; (+) strand; PAM type: YTN; PAM sequence: CTG
agagatttactcttggttct

SEQ ID NO: 403589 - DNA, 20 bp, Artificial Sequence
  Description of Artificial Sequence: Synthetic oligonucleotide
  Target: LAMA2; (+) strand; PAM type: YTN; PAM sequence: TTT
actcttggttctttgtatct

SEQ ID NO: 403590 - DNA, 20 bp, Artificial Sequence
  Description of Artificial Sequence: Synthetic oligonucleotide
  Target: LAMA2; (+) strand; PAM type: YTN; PAM sequence: TTA
ctcttggttctttgtatctt

SEQ ID NO: 403591 - DNA, 20 bp, Artificial Sequence
  Description of Artificial Sequence: Synthetic oligonucleotide
  Target: LAMA2; (+) strand; PAM type: YTN; PAM sequence: CTC
ttggttctttgtatcttgtt

SEQ ID NO: 403592 - DNA, 20 bp, Artificial Sequence
  Description of Artificial Sequence: Synthetic oligonucleotide
  Target: LAMA2; (+) strand; PAM type: YTN; PAM sequence: CTT
ggttctttgtatcttgtttt

SEQ ID NO: 403593 - DNA, 20 bp, Artificial Sequence
  Description of Artificial Sequence: Synthetic oligonucleotide
  Target: LAMA2; (+) strand; PAM type: YTN; PAM sequence: TTG
gttctttgtatcttgttttt

SEQ ID NO: 403594 - DNA, 20 bp, Artificial Sequence
  Description of Artificial Sequence: Synthetic oligonucleotide
  Target: LAMA2; (+) strand; PAM type: YTN; PAM sequence: TTC
tttgtatcttgtttttttta

SEQ ID NO: 403595 - DNA, 20 bp, Artificial Sequence
  Description of Artificial Sequence: Synthetic oligonucleotide
  Target: LAMA2; (+) strand; PAM type: YTN; PAM sequence: CTT
tgtatcttgttttttttaaa

SEQ ID NO: 403596 - DNA, 20 bp, Artificial Sequence
  Description of Artificial Sequence: Synthetic oligonucleotide
  Target: LAMA2; (+) strand; PAM type: YTN; PAM sequence: TTT
gtatcttgttttttttaaag

SEQ ID NO: 403597 - DNA, 20 bp, Artificial Sequence
  Description of Artificial Sequence: Synthetic oligonucleotide
  Target: LAMA2; (+) strand; PAM type: YTN; PAM sequence: TTG
tatcttgttttttttaaaga

SEQ ID NO: 403598 - DNA, 20 bp, Artificial Sequence
  Description of Artificial Sequence: Synthetic oligonucleotide
  Target: LAMA2; (+) strand; PAM type: YTN; PAM sequence: CTT
gttttttttaaagatcaaag

SEQ ID NO: 403599 - DNA, 20 bp, Artificial Sequence
  Description of Artificial Sequence: Synthetic oligonucleotide
  Target: LAMA2; (+) strand; PAM type: YTN; PAM sequence: TTG
ttttttttaaagatcaaagt

SEQ ID NO: 403600 - DNA, 20 bp, Artificial Sequence
  Description of Artificial Sequence: Synthetic oligonucleotide
  Target: LAMA2; (+) strand; PAM type: YTN; PAM sequence: TTT
tttttaaagatcaaagtatc

SEQ ID NO: 403601 - DNA, 20 bp, Artificial Sequence
  Description of Artificial Sequence: Synthetic oligonucleotide
  Target: LAMA2; (+) strand; PAM type: YTN; PAM sequence: TTT
ttttaaagatcaaagtatct

SEQ ID NO: 403602 - DNA, 20 bp, Artificial Sequence
  Description of Artificial Sequence: Synthetic oligonucleotide
  Target: LAMA2; (+) strand; PAM type: YTN; PAM sequence: TTT
tttaaagatcaaagtatctg

SEQ ID NO: 403603 - DNA, 20 bp, Artificial Sequence
  Description of Artificial Sequence: Synthetic oligonucleotide
  Target: LAMA2; (+) strand; PAM type: YTN; PAM sequence: TTT
ttaaagatcaaagtatctgt

SEQ ID NO: 403604 - DNA, 20 bp, Artificial Sequence
  Description of Artificial Sequence: Synthetic oligonucleotide
  Target: LAMA2; (+) strand; PAM type: YTN; PAM sequence: TTT
taaagatcaaagtatctgtg

SEQ ID NO: 403605 - DNA, 20 bp, Artificial Sequence
  Description of Artificial Sequence: Synthetic oligonucleotide
  Target: LAMA2; (+) strand; PAM type: YTN; PAM sequence: TTT
aaagatcaaagtatctgtgt

SEQ ID NO: 403606 - DNA, 20 bp, Artificial Sequence
  Description of Artificial Sequence: Synthetic oligonucleotide
  Target: LAMA2; (+) strand; PAM type: YTN; PAM sequence: TTA
aagatcaaagtatctgtgtc

SEQ ID NO: 403607 - DNA, 20 bp, Artificial Sequence
  Description of Artificial Sequence: Synthetic oligonucleotide
  Target: LAMA2; (+) strand; PAM type: YTN; PAM sequence: CTG
tgtcttcaggaggtgactgc

SEQ ID NO: 403608 - DNA, 20 bp, Artificial Sequence
  Description of Artificial Sequence: Synthetic oligonucleotide
  Target: LAMA2; (+) strand; PAM type: YTN; PAM sequence: CTT
caggaggtgactgcattcga

SEQ ID NO: 403609 - DNA, 20 bp, Artificial Sequence
  Description of Artificial Sequence: Synthetic oligonucleotide
  Target: LAMA2; (+) strand; PAM type: YTN; PAM sequence: TTC
aggaggtgactgcattcgaa

SEQ ID NO: 403610 - DNA, 20 bp, Artificial Sequence
  Description of Artificial Sequence: Synthetic oligonucleotide
  Target: LAMA2; (+) strand; PAM type: YTN; PAM sequence: CTG
cattcgaacatacaaaccag

SEQ ID NO: 403611 - DNA, 20 bp, Artificial Sequence
  Description of Artificial Sequence: Synthetic oligonucleotide
  Target: LAMA2; (+) strand; PAM type: YTN; PAM sequence: TTC
gaacatacaaaccagaaatc

SEQ ID NO: 403612 - DNA, 20 bp, Artificial Sequence
  Description of Artificial Sequence: Synthetic oligonucleotide
  Target: LAMA2; (+) strand; PAM type: YTN; PAM sequence: TTA
caataatattgttgtcaacg

SEQ ID NO: 403613 - DNA, 20 bp, Artificial Sequence
  Description of Artificial Sequence: Synthetic oligonucleotide
  Target: LAMA2; (+) strand; PAM type: YTN; PAM sequence: TTG
ttgtcaacgtaaagacagct

SEQ ID NO: 403614 - DNA, 20 bp, Artificial Sequence
  Description of Artificial Sequence: Synthetic oligonucleotide
  Target: LAMA2; (+) strand; PAM type: YTN; PAM sequence: TTG
tcaacgtaaagacagctgtt

SEQ ID NO: 403615 - DNA, 20 bp, Artificial Sequence
  Description of Artificial Sequence: Synthetic oligonucleotide
  Target: LAMA2; (+) strand; PAM type: YTN; PAM sequence: CTG
ttgctgataacctcctcttt

SEQ ID NO: 403616 - DNA, 20 bp, Artificial Sequence
  Description of Artificial Sequence: Synthetic oligonucleotide
  Target: LAMA2; (+) strand; PAM type: YTN; PAM sequence: TTG
ctgataacctcctcttttat

SEQ ID NO: 403617 - DNA, 20 bp, Artificial Sequence
  Description of Artificial Sequence: Synthetic oligonucleotide
  Target: LAMA2; (+) strand; PAM type: YTN; PAM sequence: CTG
ataacctcctcttttatctt

SEQ ID NO: 403618 - DNA, 20 bp, Artificial Sequence
  Description of Artificial Sequence: Synthetic oligonucleotide
  Target: LAMA2; (+) strand; PAM type: YTN; PAM sequence: CTC
ctcttttatcttggaagtgc

SEQ ID NO: 403619 - DNA, 20 bp, Artificial Sequence
  Description of Artificial Sequence: Synthetic oligonucleotide
  Target: LAMA2; (+) strand; PAM type: YTN; PAM sequence: CTC
ttttatcttggaagtgccaa

SEQ ID NO: 403620 - DNA, 20 bp, Artificial Sequence
  Description of Artificial Sequence: Synthetic oligonucleotide
  Target: LAMA2; (+) strand; PAM type: YTN; PAM sequence: CTT
ttatcttggaagtgccaaat

SEQ ID NO: 403621 - DNA, 20 bp, Artificial Sequence
  Description of Artificial Sequence: Synthetic oligonucleotide
  Target: LAMA2; (+) strand; PAM type: YTN; PAM sequence: TTT
tatcttggaagtgccaaatt

SEQ ID NO: 403622 - DNA, 20 bp, Artificial Sequence
  Description of Artificial Sequence: Synthetic oligonucleotide
  Target: LAMA2; (+) strand; PAM type: YTN; PAM sequence: TTT
atcttggaagtgccaaattt

SEQ ID NO: 403623 - DNA, 20 bp, Artificial Sequence
  Description of Artificial Sequence: Synthetic oligonucleotide
  Target: LAMA2; (+) strand; PAM type: YTN; PAM sequence: TTA
tcttggaagtgccaaatttg

SEQ ID NO: 403624 - DNA, 20 bp, Artificial Sequence
  Description of Artificial Sequence: Synthetic oligonucleotide
  Target: LAMA2; (+) strand; PAM type: YTN; PAM sequence: CTT
ggaagtgccaaatttgtaag

SEQ ID NO: 403625 - DNA, 20 bp, Artificial Sequence
  Description of Artificial Sequence: Synthetic oligonucleotide
  Target: LAMA2; (+) strand; PAM type: YTN; PAM sequence: TTG
gaagtgccaaatttgtaagt

SEQ ID NO: 403626 - DNA, 20 bp, Artificial Sequence
  Description of Artificial Sequence: Synthetic oligonucleotide
  Target: LAMA2; (+) strand; PAM type: YTN; PAM sequence: TTT
gtaagtctaatattcaactt

SEQ ID NO: 403627 - DNA, 20 bp, Artificial Sequence
  Description of Artificial Sequence: Synthetic oligonucleotide
  Target: LAMA2; (+) strand; PAM type: YTN; PAM sequence: TTG
taagtctaatattcaacttt

SEQ ID NO: 403628 - DNA, 20 bp, Artificial Sequence
  Description of Artificial Sequence: Synthetic oligonucleotide
  Target: LAMA2; (+) strand; PAM type: YTN; PAM sequence: CTA
atattcaacttttcattagg

SEQ ID NO: 403629 - DNA, 20 bp, Artificial Sequence
  Description of Artificial Sequence: Synthetic oligonucleotide
  Target: LAMA2; (+) strand; PAM type: YTN; PAM sequence: TTC
aacttttcattaggctgctg

SEQ ID NO: 403630 - DNA, 20 bp, Artificial Sequence
  Description of Artificial Sequence: Synthetic oligonucleotide
  Target: LAMA2; (+) strand; PAM type: YTN; PAM sequence: CTT
ttcattaggctgctgtatgt

SEQ ID NO: 403631 - DNA, 20 bp, Artificial Sequence
  Description of Artificial Sequence: Synthetic oligonucleotide
  Target: LAMA2; (+) strand; PAM type: YTN; PAM sequence: TTT
tcattaggctgctgtatgtg

SEQ ID NO: 403632 - DNA, 20 bp, Artificial Sequence
  Description of Artificial Sequence: Synthetic oligonucleotide
  Target: LAMA2; (+) strand; PAM type: YTN; PAM sequence: TTT
cattaggctgctgtatgtgt

SEQ ID NO: 403633 - DNA, 20 bp, Artificial Sequence
  Description of Artificial Sequence: Synthetic oligonucleotide
  Target: LAMA2; (+) strand; PAM type: YTN; PAM sequence: TTC
attaggctgctgtatgtgta

SEQ ID NO: 403634 - DNA, 20 bp, Artificial Sequence
  Description of Artificial Sequence: Synthetic oligonucleotide
  Target: LAMA2; (+) strand; PAM type: YTN; PAM sequence: TTA
ggctgctgtatgtgtatagc

SEQ ID NO: 403635 - DNA, 20 bp, Artificial Sequence
  Description of Artificial Sequence: Synthetic oligonucleotide
  Target: LAMA2; (+) strand; PAM type: YTN; PAM sequence: CTG
ctgtatgtgtatagctagag

SEQ ID NO: 403636 - DNA, 20 bp, Artificial Sequence
  Description of Artificial Sequence: Synthetic oligonucleotide
  Target: LAMA2; (+) strand; PAM type: YTN; PAM sequence: CTG
tatgtgtatagctagaggtt

SEQ ID NO: 403637 - DNA, 20 bp, Artificial Sequence
  Description of Artificial Sequence: Synthetic oligonucleotide
  Target: LAMA2; (+) strand; PAM type: YTN; PAM sequence: CTA
gaggttaatctgaaaatgta

SEQ ID NO: 403638 - DNA, 20 bp, Artificial Sequence
  Description of Artificial Sequence: Synthetic oligonucleotide
  Target: LAMA2; (+) strand; PAM type: YTN; PAM sequence: TTA
atctgaaaatgtatagaatc

SEQ ID NO: 403639 - DNA, 20 bp, Artificial Sequence
  Description of Artificial Sequence: Synthetic oligonucleotide
  Target: LAMA2; (+) strand; PAM type: YTN; PAM sequence: CTG
aaaatgtatagaatccccaa

SEQ ID NO: 403640 - DNA, 20 bp, Artificial Sequence
  Description of Artificial Sequence: Synthetic oligonucleotide
  Target: LAMA2; (+) strand; PAM type: YTN; PAM sequence: CTA
acgtaggctttcagatttga

SEQ ID NO: 403641 - DNA, 20 bp, Artificial Sequence
  Description of Artificial Sequence: Synthetic oligonucleotide
  Target: LAMA2; (+) strand; PAM type: YTN; PAM sequence: CTT
tcagatttgaaaacctcaac

SEQ ID NO: 403642 - DNA, 20 bp, Artificial Sequence
  Description of Artificial Sequence: Synthetic oligonucleotide
  Target: LAMA2; (+) strand; PAM type: YTN; PAM sequence: TTT
cagatttgaaaacctcaacg

SEQ ID NO: 403643 - DNA, 20 bp, Artificial Sequence
  Description of Artificial Sequence: Synthetic oligonucleotide
  Target: LAMA2; (+) strand; PAM type: YTN; PAM sequence: TTC
agatttgaaaacctcaacgt

SEQ ID NO: 403644 - DNA, 20 bp, Artificial Sequence
  Description of Artificial Sequence: Synthetic oligonucleotide
  Target: LAMA2; (+) strand; PAM type: YTN; PAM sequence: TTT
gaaaacctcaacgtcttacc

SEQ ID NO: 403645 - DNA, 20 bp, Artificial Sequence
  Description of Artificial Sequence: Synthetic oligonucleotide
  Target: LAMA2; (+) strand; PAM type: YTN; PAM sequence: TTG
aaaacctcaacgtcttacct

SEQ ID NO: 403646 - DNA, 20 bp, Artificial Sequence
  Description of Artificial Sequence: Synthetic oligonucleotide
  Target: LAMA2; (+) strand; PAM type: YTN; PAM sequence: CTC
aacgtcttaccttacaaaat

SEQ ID NO: 403647 - DNA, 20 bp, Artificial Sequence
  Description of Artificial Sequence: Synthetic oligonucleotide
  Target: LAMA2; (+) strand; PAM type: YTN; PAM sequence: CTT
accttacaaaattctgaaga

SEQ ID NO: 403648 - DNA, 20 bp, Artificial Sequence
  Description of Artificial Sequence: Synthetic oligonucleotide
  Target: LAMA2; (+) strand; PAM type: YTN; PAM sequence: TTA
ccttacaaaattctgaagag

SEQ ID NO: 403649 - DNA, 20 bp, Artificial Sequence
  Description of Artificial Sequence: Synthetic oligonucleotide
  Target: LAMA2; (+) strand; PAM type: YTN; PAM sequence: CTT
acaaaattctgaagagtcaa

SEQ ID NO: 403650 - DNA, 20 bp, Artificial Sequence
  Description of Artificial Sequence: Synthetic oligonucleotide
  Target: LAMA2; (+) strand; PAM type: YTN; PAM sequence: TTA
caaaattctgaagagtcaaa

SEQ ID NO: 403651 - DNA, 20 bp, Artificial Sequence
  Description of Artificial Sequence: Synthetic oligonucleotide
  Target: LAMA2; (+) strand; PAM type: YTN; PAM sequence: TTC
tgaagagtcaaattaagtta

SEQ ID NO: 403652 - DNA, 20 bp, Artificial Sequence
  Description of Artificial Sequence: Synthetic oligonucleotide
  Target: LAMA2; (+) strand; PAM type: YTN; PAM sequence: CTG
aagagtcaaattaagttaga

SEQ ID NO: 403653 - DNA, 20 bp, Artificial Sequence
  Description of Artificial Sequence: Synthetic oligonucleotide
  Target: LAMA2; (+) strand; PAM type: YTN; PAM sequence: TTA
agttagaaggcaaatgaaag

SEQ ID NO: 403654 - DNA, 20 bp, Artificial Sequence
  Description of Artificial Sequence: Synthetic oligonucleotide
  Target: LAMA2; (+) strand; PAM type: YTN; PAM sequence: TTA
gaaggcaaatgaaaggaaga

SEQ ID NO: 403655 - DNA, 20 bp, Artificial Sequence
  Description of Artificial Sequence: Synthetic oligonucleotide
  Target: LAMA2; (+) strand; PAM type: YTN; PAM sequence: CTA
cagtgtttagtcacatttac

SEQ ID NO: 403656 - DNA, 20 bp, Artificial Sequence
  Description of Artificial Sequence: Synthetic oligonucleotide
  Target: LAMA2; (+) strand; PAM type: YTN; PAM sequence: TTT
agtcacatttactttcattt

SEQ ID NO: 403657 - DNA, 20 bp, Artificial Sequence
  Description of Artificial Sequence: Synthetic oligonucleotide
  Target: LAMA2; (+) strand; PAM type: YTN; PAM sequence: TTA
gtcacatttactttcatttg

SEQ ID NO: 403658 - DNA, 20 bp, Artificial Sequence
  Description of Artificial Sequence: Synthetic oligonucleotide
  Target: LAMA2; (+) strand; PAM type: YTN; PAM sequence: TTT
actttcatttgtcagtatac

SEQ ID NO: 403659 - DNA, 20 bp, Artificial Sequence
  Description of Artificial Sequence: Synthetic oligonucleotide
  Target: LAMA2; (+) strand; PAM type: YTN; PAM sequence: TTA
ctttcatttgtcagtatacc

SEQ ID NO: 403660 - DNA, 20 bp, Artificial Sequence
  Description of Artificial Sequence: Synthetic oligonucleotide
  Target: LAMA2; (+) strand; PAM type: YTN; PAM sequence: CTT
tcatttgtcagtataccatc

SEQ ID NO: 403661 - DNA, 20 bp, Artificial Sequence
  Description of Artificial Sequence: Synthetic oligonucleotide
  Target: LAMA2; (+) strand; PAM type: YTN; PAM sequence: TTT
catttgtcagtataccatca

SEQ ID NO: 403662 - DNA, 20 bp, Artificial Sequence
  Description of Artificial Sequence: Synthetic oligonucleotide
  Target: LAMA2; (+) strand; PAM type: YTN; PAM sequence: TTC
atttgtcagtataccatcat

SEQ ID NO: 403663 - DNA, 20 bp, Artificial Sequence
  Description of Artificial Sequence: Synthetic oligonucleotide
  Target: LAMA2; (+) strand; PAM type: YTN; PAM sequence: TTT
gtcagtataccatcatttct

SEQ ID NO: 403664 - DNA, 20 bp, Artificial Sequence
  Description of Artificial Sequence: Synthetic oligonucleotide
  Target: LAMA2; (+) strand; PAM type: YTN; PAM sequence: TTG
tcagtataccatcatttctg

SEQ ID NO: 403665 - DNA, 20 bp, Artificial Sequence
  Description of Artificial Sequence: Synthetic oligonucleotide
  Target: LAMA2; (+) strand; PAM type: YTN; PAM sequence: TTT
ctgttaaattatactttcag

SEQ ID NO: 403666 - DNA, 20 bp, Artificial Sequence
  Description of Artificial Sequence: Synthetic oligonucleotide
  Target: LAMA2; (+) strand; PAM type: YTN; PAM sequence: TTC
tgttaaattatactttcaga

SEQ ID NO: 403667 - DNA, 20 bp, Artificial Sequence
  Description of Artificial Sequence: Synthetic oligonucleotide
  Target: LAMA2; (+) strand; PAM type: YTN; PAM sequence: CTG
ttaaattatactttcagatc

SEQ ID NO: 403668 - DNA, 20 bp, Artificial Sequence
  Description of Artificial Sequence: Synthetic oligonucleotide
  Target: LAMA2; (+) strand; PAM type: YTN; PAM sequence: TTA
aattatactttcagatccag

SEQ ID NO: 403669 - DNA, 20 bp, Artificial Sequence
  Description of Artificial Sequence: Synthetic oligonucleotide
  Target: LAMA2; (+) strand; PAM type: YTN; PAM sequence: TTA
tactttcagatccagtgatt

SEQ ID NO: 403670 - DNA, 20 bp, Artificial Sequence
  Description of Artificial Sequence: Synthetic oligonucleotide
  Target: LAMA2; (+) strand; PAM type: YTN; PAM sequence: CTT
tcagatccagtgatttaaga

SEQ ID NO: 403671 - DNA, 20 bp, Artificial Sequence
  Description of Artificial Sequence: Synthetic oligonucleotide
  Target: LAMA2; (+) strand; PAM type: YTN; PAM sequence: TTT
cagatccagtgatttaagaa

SEQ ID NO: 403672 - DNA, 20 bp, Artificial Sequence
  Description of Artificial Sequence: Synthetic oligonucleotide
  Target: LAMA2; (+) strand; PAM type: YTN; PAM sequence: TTC
agatccagtgatttaagaat

SEQ ID NO: 403673 - DNA, 20 bp, Artificial Sequence
  Description of Artificial Sequence: Synthetic oligonucleotide
  Target: LAMA2; (+) strand; PAM type: YTN; PAM sequence: TTT
aagaatgctaatgagaataa

SEQ ID NO: 403674 - DNA, 20 bp, Artificial Sequence
  Description of Artificial Sequence: Synthetic oligonucleotide
  Target: LAMA2; (+) strand; PAM type: YTN; PAM sequence: TTA
agaatgctaatgagaataaa

SEQ ID NO: 403675 - DNA, 20 bp, Artificial Sequence
  Description of Artificial Sequence: Synthetic oligonucleotide
  Target: LAMA2; (+) strand; PAM type: YTN; PAM sequence: CTA
atgagaataaagctatttta

SEQ ID NO: 403676 - DNA, 20 bp, Artificial Sequence
  Description of Artificial Sequence: Synthetic oligonucleotide
  Target: LAMA2; (+) strand; PAM type: YTN; PAM sequence: CTA
ttttatttacttcttattta

SEQ ID NO: 403677 - DNA, 20 bp, Artificial Sequence
  Description of Artificial Sequence: Synthetic oligonucleotide
  Target: LAMA2; (+) strand; PAM type: YTN; PAM sequence: TTT
tatttacttcttatttattt

SEQ ID NO: 403678 - DNA, 20 bp, Artificial Sequence
  Description of Artificial Sequence: Synthetic oligonucleotide
  Target: LAMA2; (+) strand; PAM type: YTN; PAM sequence: TTT
atttacttcttatttattta

SEQ ID NO: 403679 - DNA, 20 bp, Artificial Sequence
  Description of Artificial Sequence: Synthetic oligonucleotide
  Target: LAMA2; (+) strand; PAM type: YTN; PAM sequence: TTA
tttacttcttatttatttat

SEQ ID NO: 403680 - DNA, 20 bp, Artificial Sequence
  Description of Artificial Sequence: Synthetic oligonucleotide
  Target: LAMA2; (+) strand; PAM type: YTN; PAM sequence: TTT
acttcttatttatttatctt

SEQ ID NO: 403681 - DNA, 20 bp, Artificial Sequence
  Description of Artificial Sequence: Synthetic oligonucleotide
  Target: LAMA2; (+) strand; PAM type: YTN; PAM sequence: TTA
cttcttatttatttatctta

SEQ ID NO: 403682 - DNA, 20 bp, Artificial Sequence
  Description of Artificial Sequence: Synthetic oligonucleotide
  Target: LAMA2; (+) strand; PAM type: YTN; PAM sequence: CTT
cttatttatttatcttattt

SEQ ID NO: 403683 - DNA, 20 bp, Artificial Sequence
  Description of Artificial Sequence: Synthetic oligonucleotide
  Target: LAMA2; (+) strand; PAM type: YTN; PAM sequence: TTC
ttatttatttatcttattta

SEQ ID NO: 403684 - DNA, 20 bp, Artificial Sequence
  Description of Artificial Sequence: Synthetic oligonucleotide
  Target: LAMA2; (+) strand; PAM type: YTN; PAM sequence: CTT
atttatttatcttatttact

SEQ ID NO: 403685 - DNA, 20 bp, Artificial Sequence
  Description of Artificial Sequence: Synthetic oligonucleotide
  Target: LAMA2; (+) strand; PAM type: YTN; PAM sequence: TTA
tttatttatcttatttactg

SEQ ID NO: 403686 - DNA, 20 bp, Artificial Sequence
  Description of Artificial Sequence: Synthetic oligonucleotide
  Target: LAMA2; (+) strand; PAM type: YTN; PAM sequence: TTT
atttatcttatttactgttc

SEQ ID NO: 403687 - DNA, 20 bp, Artificial Sequence
  Description of Artificial Sequence: Synthetic oligonucleotide
  Target: LAMA2; (+) strand; PAM type: YTN; PAM sequence: TTA
tttatcttatttactgttca

SEQ ID NO: 403688 - DNA, 20 bp, Artificial Sequence
  Description of Artificial Sequence: Synthetic oligonucleotide
  Target: LAMA2; (+) strand; PAM type: YTN; PAM sequence: TTT
atcttatttactgttcaaac

SEQ ID NO: 403689 - DNA, 20 bp, Artificial Sequence
  Description of Artificial Sequence: Synthetic oligonucleotide
  Target: LAMA2; (+) strand; PAM type: YTN; PAM sequence: TTA
tcttatttactgttcaaact

SEQ ID NO: 403690 - DNA, 20 bp, Artificial Sequence
  Description of Artificial Sequence: Synthetic oligonucleotide
  Target: LAMA2; (+) strand; PAM type: YTN; PAM sequence: CTT
atttactgttcaaactaaat

SEQ ID NO: 403691 - DNA, 20 bp, Artificial Sequence
  Description of Artificial Sequence: Synthetic oligonucleotide
  Target: LAMA2; (+) strand; PAM type: YTN; PAM sequence: TTA
tttactgttcaaactaaatt

SEQ ID NO: 403692 - DNA, 20 bp, Artificial Sequence
  Description of Artificial Sequence: Synthetic oligonucleotide
  Target: LAMA2; (+) strand; PAM type: YTN; PAM sequence: TTT
actgttcaaactaaattaca

SEQ ID NO: 403693 - DNA, 20 bp, Artificial Sequence
  Description of Artificial Sequence: Synthetic oligonucleotide
  Target: LAMA2; (+) strand; PAM type: YTN; PAM sequence: TTA
ctgttcaaactaaattacaa

SEQ ID NO: 403694 - DNA, 20 bp, Artificial Sequence
  Description of Artificial Sequence: Synthetic oligonucleotide
  Target: LAMA2; (+) strand; PAM type: YTN; PAM sequence: CTG
ttcaaactaaattacaataa

SEQ ID NO: 403695 - DNA, 20 bp, Artificial Sequence
  Description of Artificial Sequence: Synthetic oligonucleotide
  Target: LAMA2; (+) strand; PAM type: YTN; PAM sequence: TTC
aaactaaattacaataaact

SEQ ID NO: 403696 - DNA, 20 bp, Artificial Sequence
  Description of Artificial Sequence: Synthetic oligonucleotide
  Target: LAMA2; (+) strand; PAM type: YTN; PAM sequence: CTA
aattacaataaactcttccg

SEQ ID NO: 403697 - DNA, 20 bp, Artificial Sequence
  Description of Artificial Sequence: Synthetic oligonucleotide
  Target: LAMA2; (+) strand; PAM type: YTN; PAM sequence: TTA
caataaactcttccgttaat

SEQ ID NO: 403698 - DNA, 20 bp, Artificial Sequence
  Description of Artificial Sequence: Synthetic oligonucleotide
  Target: LAMA2; (+) strand; PAM type: YTN; PAM sequence: CTC
ttccgttaatgaaatgaaaa

SEQ ID NO: 403699 - DNA, 20 bp, Artificial Sequence
  Description of Artificial Sequence: Synthetic oligonucleotide
  Target: LAMA2; (+) strand; PAM type: YTN; PAM sequence: CTT
ccgttaatgaaatgaaaata

SEQ ID NO: 403700 - DNA, 20 bp, Artificial Sequence
  Description of Artificial Sequence: Synthetic oligonucleotide
  Target: LAMA2; (+) strand; PAM type: YTN; PAM sequence: TTC
cgttaatgaaatgaaaatag

SEQ ID NO: 403701 - DNA, 20 bp, Artificial Sequence
  Description of Artificial Sequence: Synthetic oligonucleotide
  Target: LAMA2; (+) strand; PAM type: YTN; PAM sequence: TTA
atgaaatgaaaatagcaaag

SEQ ID NO: 403702 - DNA, 20 bp, Artificial Sequence
  Description of Artificial Sequence: Synthetic oligonucleotide
  Target: LAMA2; (+) strand; PAM type: YTN; PAM sequence: CTA
ttttttttaccaatggaaac

SEQ ID NO: 403703 - DNA, 20 bp, Artificial Sequence
  Description of Artificial Sequence: Synthetic oligonucleotide
  Target: LAMA2; (+) strand; PAM type: YTN; PAM sequence: TTT
tttttaccaatggaaactct

SEQ ID NO: 403704 - DNA, 20 bp, Artificial Sequence
  Description of Artificial Sequence: Synthetic oligonucleotide
  Target: LAMA2; (+) strand; PAM type: YTN; PAM sequence: TTT
ttttaccaatggaaactctt

SEQ ID NO: 403705 - DNA, 20 bp, Artificial Sequence
  Description of Artificial Sequence: Synthetic oligonucleotide
  Target: LAMA2; (+) strand; PAM type: YTN; PAM sequence: TTT
tttaccaatggaaactcttc

SEQ ID NO: 403706 - DNA, 20 bp, Artificial Sequence
  Description of Artificial Sequence: Synthetic oligonucleotide
  Target: LAMA2; (+) strand; PAM type: YTN; PAM sequence: TTT
ttaccaatggaaactcttct

SEQ ID NO: 403707 - DNA, 20 bp, Artificial Sequence
  Description of Artificial Sequence: Synthetic oligonucleotide
  Target: LAMA2; (+) strand; PAM type: YTN; PAM sequence: TTT
taccaatggaaactcttcta

SEQ ID NO: 403708 - DNA, 20 bp, Artificial Sequence
  Description of Artificial Sequence: Synthetic oligonucleotide
  Target: LAMA2; (+) strand; PAM type: YTN; PAM sequence: TTT
accaatggaaactcttctaa

SEQ ID NO: 403709 - DNA, 20 bp, Artificial Sequence
  Description of Artificial Sequence: Synthetic oligonucleotide
  Target: LAMA2; (+) strand; PAM type: YTN; PAM sequence: TTA
ccaatggaaactcttctaac

SEQ ID NO: 403710 - DNA, 20 bp, Artificial Sequence
  Description of Artificial Sequence: Synthetic oligonucleotide
  Target: LAMA2; (+) strand; PAM type: YTN; PAM sequence: CTC
ttctaacttgtgttgaattt

SEQ ID NO: 403711 - DNA, 20 bp, Artificial Sequence
  Description of Artificial Sequence: Synthetic oligonucleotide
  Target: LAMA2; (+) strand; PAM type: YTN; PAM sequence: CTT
ctaacttgtgttgaatttat

SEQ ID NO: 403712 - DNA, 20 bp, Artificial Sequence
  Description of Artificial Sequence: Synthetic oligonucleotide
  Target: LAMA2; (+) strand; PAM type: YTN; PAM sequence: TTC
taacttgtgttgaatttatg

SEQ ID NO: 403713 - DNA, 20 bp, Artificial Sequence
  Description of Artificial Sequence: Synthetic oligonucleotide
  Target: LAMA2; (+) strand; PAM type: YTN; PAM sequence: CTA
acttgtgttgaatttatgac

SEQ ID NO: 403714 - DNA, 20 bp, Artificial Sequence
  Description of Artificial Sequence: Synthetic oligonucleotide
  Target: LAMA2; (+) strand; PAM type: YTN; PAM sequence: CTT
gtgttgaatttatgacctga

SEQ ID NO: 403715 - DNA, 20 bp, Artificial Sequence
  Description of Artificial Sequence: Synthetic oligonucleotide
  Target: LAMA2; (+) strand; PAM type: YTN; PAM sequence: TTG
tgttgaatttatgacctgaa

SEQ ID NO: 403716 - DNA, 20 bp, Artificial Sequence
  Description of Artificial Sequence: Synthetic oligonucleotide
  Target: LAMA2; (+) strand; PAM type: YTN; PAM sequence: TTG
aatttatgacctgaactgaa

SEQ ID NO: 403717 - DNA, 20 bp, Artificial Sequence
  Description of Artificial Sequence: Synthetic oligonucleotide
  Target: LAMA2; (+) strand; PAM type: YTN; PAM sequence: TTT
atgacctgaactgaaataac

SEQ ID NO: 403718 - DNA, 20 bp, Artificial Sequence
  Description of Artificial Sequence: Synthetic oligonucleotide
  Target: LAMA2; (+) strand; PAM type: YTN; PAM sequence: TTA
tgacctgaactgaaataaca

SEQ ID NO: 403719 - DNA, 20 bp, Artificial Sequence
  Description of Artificial Sequence: Synthetic oligonucleotide
  Target: LAMA2; (+) strand; PAM type: YTN; PAM sequence: CTG
aactgaaataacacagatta

SEQ ID NO: 403720 - DNA, 20 bp, Artificial Sequence
  Description of Artificial Sequence: Synthetic oligonucleotide
  Target: LAMA2; (+) strand; PAM type: YTN; PAM sequence: CTG
aaataacacagattatatct

SEQ ID NO: 403721 - DNA, 20 bp, Artificial Sequence
  Description of Artificial Sequence: Synthetic oligonucleotide
  Target: LAMA2; (+) strand; PAM type: YTN; PAM sequence: TTA
tatctacaaaagcccaccca

SEQ ID NO: 403722 - DNA, 20 bp, Artificial Sequence
  Description of Artificial Sequence: Synthetic oligonucleotide
  Target: LAMA2; (+) strand; PAM type: YTN; PAM sequence: CTA
caaaagcccacccataaagt

SEQ ID NO: 403723 - DNA, 20 bp, Artificial Sequence
  Description of Artificial Sequence: Synthetic oligonucleotide
  Target: LAMA2; (+) strand; PAM type: YTN; PAM sequence: TTC
taatttcttccatttgaact

SEQ ID NO: 403724 - DNA, 20 bp, Artificial Sequence
  Description of Artificial Sequence: Synthetic oligonucleotide
  Target: LAMA2; (+) strand; PAM type: YTN; PAM sequence: CTA
atttcttccatttgaactat

SEQ ID NO: 403725 - DNA, 20 bp, Artificial Sequence
  Description of Artificial Sequence: Synthetic oligonucleotide
  Target: LAMA2; (+) strand; PAM type: YTN; PAM sequence: TTT
cttccatttgaactatttga

SEQ ID NO: 403726 - DNA, 20 bp, Artificial Sequence
  Description of Artificial Sequence: Synthetic oligonucleotide
  Target: LAMA2; (+) strand; PAM type: YTN; PAM sequence: TTC
ttccatttgaactatttgac

SEQ ID NO: 403727 - DNA, 20 bp, Artificial Sequence
  Description of Artificial Sequence: Synthetic oligonucleotide
  Target: LAMA2; (+) strand; PAM type: YTN; PAM sequence: CTT
ccatttgaactatttgactt

SEQ ID NO: 403728 - DNA, 20 bp, Artificial Sequence
  Description of Artificial Sequence: Synthetic oligonucleotide
  Target: LAMA2; (+) strand; PAM type: YTN; PAM sequence: TTC
catttgaactatttgacttt

SEQ ID NO: 403729 - DNA, 20 bp, Artificial Sequence
  Description of Artificial Sequence: Synthetic oligonucleotide
  Target: LAMA2; (+) strand; PAM type: YTN; PAM sequence: TTT
gaactatttgactttgcatg

SEQ ID NO: 403730 - DNA, 20 bp, Artificial Sequence
  Description of Artificial Sequence: Synthetic oligonucleotide
  Target: LAMA2; (+) strand; PAM type: YTN; PAM sequence: TTG
aactatttgactttgcatgc

SEQ ID NO: 403731 - DNA, 20 bp, Artificial Sequence
  Description of Artificial Sequence: Synthetic oligonucleotide
  Target: LAMA2; (+) strand; PAM type: YTN; PAM sequence: CTA
tttgactttgcatgcatggg

SEQ ID NO: 403732 - DNA, 20 bp, Artificial Sequence
  Description of Artificial Sequence: Synthetic oligonucleotide
  Target: LAMA2; (+) strand; PAM type: YTN; PAM sequence: TTT
gactttgcatgcatggggat

SEQ ID NO: 403733 - DNA, 20 bp, Artificial Sequence
  Description of Artificial Sequence: Synthetic oligonucleotide
  Target: LAMA2; (+) strand; PAM type: YTN; PAM sequence: TTG
actttgcatgcatggggatt

SEQ ID NO: 403734 - DNA, 20 bp, Artificial Sequence
  Description of Artificial Sequence: Synthetic oligonucleotide
  Target: LAMA2; (+) strand; PAM type: YTN; PAM sequence: CTT
tgcatgcatggggattttcc

SEQ ID NO: 403735 - DNA, 20 bp, Artificial Sequence
  Description of Artificial Sequence: Synthetic oligonucleotide
  Target: LAMA2; (+) strand; PAM type: YTN; PAM sequence: TTT
gcatgcatggggattttcca

SEQ ID NO: 403736 - DNA, 20 bp, Artificial Sequence
  Description of Artificial Sequence: Synthetic oligonucleotide
  Target: LAMA2; (+) strand; PAM type: YTN; PAM sequence: TTG
catgcatggggattttccaa

SEQ ID NO: 403737 - DNA, 20 bp, Artificial Sequence
  Description of Artificial Sequence: Synthetic oligonucleotide
  Target: LAMA2; (+) strand; PAM type: YTN; PAM sequence: TTT
tccaaaatgaatatgacttc

SEQ ID NO: 403738 - DNA, 20 bp, Artificial Sequence
  Description of Artificial Sequence: Synthetic oligonucleotide
  Target: LAMA2; (+) strand; PAM type: YTN; PAM sequence: TTT
ccaaaatgaatatgacttct

SEQ ID NO: 403739 - DNA, 20 bp, Artificial Sequence
  Description of Artificial Sequence: Synthetic oligonucleotide
  Target: LAMA2; (+) strand; PAM type: YTN; PAM sequence: TTC
caaaatgaatatgacttctt

SEQ ID NO: 403740 - DNA, 20 bp, Artificial Sequence
  Description of Artificial Sequence: Synthetic oligonucleotide
  Target: LAMA2; (+) strand; PAM type: YTN; PAM sequence: CTT
cttaacaaatcattcatggc

SEQ ID NO: 403741 - DNA, 20 bp, Artificial Sequence
  Description of Artificial Sequence: Synthetic oligonucleotide
  Target: LAMA2; (+) strand; PAM type: YTN; PAM sequence: TTC
ttaacaaatcattcatggca

SEQ ID NO: 403742 - DNA, 20 bp, Artificial Sequence
  Description of Artificial Sequence: Synthetic oligonucleotide
  Target: LAMA2; (+) strand; PAM type: YTN; PAM sequence: CTT
aacaaatcattcatggcata

SEQ ID NO: 403743 - DNA, 20 bp, Artificial Sequence
  Description of Artificial Sequence: Synthetic oligonucleotide
  Target: LAMA2; (+) strand; PAM type: YTN; PAM sequence: TTA
acaaatcattcatggcataa

SEQ ID NO: 403744 - DNA, 20 bp, Artificial Sequence
  Description of Artificial Sequence: Synthetic oligonucleotide
  Target: LAMA2; (+) strand; PAM type: YTN; PAM sequence: TTC
atggcataagtcaatatttg

SEQ ID NO: 403745 - DNA, 20 bp, Artificial Sequence
  Description of Artificial Sequence: Synthetic oligonucleotide
  Target: LAMA2; (+) strand; PAM type: YTN; PAM sequence: TTT
gccatttgggtaaggaattc

SEQ ID NO: 403746 - DNA, 20 bp, Artificial Sequence
  Description of Artificial Sequence: Synthetic oligonucleotide
  Target: LAMA2; (+) strand; PAM type: YTN; PAM sequence: TTG
ccatttgggtaaggaattct

SEQ ID NO: 403747 - DNA, 20 bp, Artificial Sequence
  Description of Artificial Sequence: Synthetic oligonucleotide
  Target: LAMA2; (+) strand; PAM type: YTN; PAM sequence: TTT
gggtaaggaattctgggtca

SEQ ID NO: 403748 - DNA, 20 bp, Artificial Sequence
  Description of Artificial Sequence: Synthetic oligonucleotide
  Target: LAMA2; (+) strand; PAM type: YTN; PAM sequence: TTG
ggtaaggaattctgggtcaa

SEQ ID NO: 403749 - DNA, 20 bp, Artificial Sequence
  Description of Artificial Sequence: Synthetic oligonucleotide
  Target: LAMA2; (+) strand; PAM type: YTN; PAM sequence: TTC
tgggtcaatttgggaaataa

SEQ ID NO: 403750 - DNA, 20 bp, Artificial Sequence
  Description of Artificial Sequence: Synthetic oligonucleotide
  Target: LAMA2; (+) strand; PAM type: YTN; PAM sequence: CTG
ggtcaatttgggaaataaaa

SEQ ID NO: 403751 - DNA, 20 bp, Artificial Sequence
  Description of Artificial Sequence: Synthetic oligonucleotide
  Target: LAMA2; (+) strand; PAM type: YTN; PAM sequence: TTT
gggaaataaaatcatagctg

SEQ ID NO: 403752 - DNA, 20 bp, Artificial Sequence
  Description of Artificial Sequence: Synthetic oligonucleotide
  Target: LAMA2; (+) strand; PAM type: YTN; PAM sequence: TTG
ggaaataaaatcatagctgc

SEQ ID NO: 403753 - DNA, 20 bp, Artificial Sequence
  Description of Artificial Sequence: Synthetic oligonucleotide
  Target: LAMA2; (+) strand; PAM type: YTN; PAM sequence: CTG
ccccctcaaaaatgtcagtg

SEQ ID NO: 403754 - DNA, 20 bp, Artificial Sequence
  Description of Artificial Sequence: Synthetic oligonucleotide
  Target: LAMA2; (+) strand; PAM type: YTN; PAM sequence: CTC
aaaaatgtcagtgtccttgg

SEQ ID NO: 403755 - DNA, 20 bp, Artificial Sequence
  Description of Artificial Sequence: Synthetic oligonucleotide
  Target: LAMA2; (+) strand; PAM type: YTN; PAM sequence: CTT
ggtgaaaataataatggatt

SEQ ID NO: 403756 - DNA, 20 bp, Artificial Sequence
  Description of Artificial Sequence: Synthetic oligonucleotide
  Target: LAMA2; (+) strand; PAM type: YTN; PAM sequence: TTG
gtgaaaataataatggattc

SEQ ID NO: 403757 - DNA, 20 bp, Artificial Sequence
  Description of Artificial Sequence: Synthetic oligonucleotide
  Target: LAMA2; (+) strand; PAM type: YTN; PAM sequence: TTC
tgaatttaaatatttgtttt

SEQ ID NO: 403758 - DNA, 20 bp, Artificial Sequence
  Description of Artificial Sequence: Synthetic oligonucleotide
  Target: LAMA2; (+) strand; PAM type: YTN; PAM sequence: CTG
aatttaaatatttgttttta

SEQ ID NO: 403759 - DNA, 20 bp, Artificial Sequence
  Description of Artificial Sequence: Synthetic oligonucleotide
  Target: LAMA2; (+) strand; PAM type: YTN; PAM sequence: TTT
aaatatttgtttttatcttt

SEQ ID NO: 403760 - DNA, 20 bp, Artificial Sequence
  Description of Artificial Sequence: Synthetic oligonucleotide
  Target: LAMA2; (+) strand; PAM type: YTN; PAM sequence: TTA
aatatttgtttttatcttta

SEQ ID NO: 403761 - DNA, 20 bp, Artificial Sequence
  Description of Artificial Sequence: Synthetic oligonucleotide
  Target: LAMA2; (+) strand; PAM type: YTN; PAM sequence: TTT
gtttttatctttaccacaag

SEQ ID NO: 403762 - DNA, 20 bp, Artificial Sequence
  Description of Artificial Sequence: Synthetic oligonucleotide
  Target: LAMA2; (+) strand; PAM type: YTN; PAM sequence: TTG
tttttatctttaccacaagt

SEQ ID NO: 403763 - DNA, 20 bp, Artificial Sequence
  Description of Artificial Sequence: Synthetic oligonucleotide
  Target: LAMA2; (+) strand; PAM type: YTN; PAM sequence: TTT
ttatctttaccacaagtatc

SEQ ID NO: 403764 - DNA, 20 bp, Artificial Sequence
  Description of Artificial Sequence: Synthetic oligonucleotide
  Target: LAMA2; (+) strand; PAM type: YTN; PAM sequence: TTT
tatctttaccacaagtatca

SEQ ID NO: 403765 - DNA, 20 bp, Artificial Sequence
  Description of Artificial Sequence: Synthetic oligonucleotide
  Target: LAMA2; (+) strand; PAM type: YTN; PAM sequence: TTT
atctttaccacaagtatcag

SEQ ID NO: 403766 - DNA, 20 bp, Artificial Sequence
  Description of Artificial Sequence: Synthetic oligonucleotide
  Target: LAMA2; (+) strand; PAM type: YTN; PAM sequence: TTA
tctttaccacaagtatcaga

SEQ ID NO: 403767 - DNA, 20 bp, Artificial Sequence
  Description of Artificial Sequence: Synthetic oligonucleotide
  Target: LAMA2; (+) strand; PAM type: YTN; PAM sequence: CTT
taccacaagtatcagagtga

SEQ ID NO: 403768 - DNA, 20 bp, Artificial Sequence
  Description of Artificial Sequence: Synthetic oligonucleotide
  Target: LAMA2; (+) strand; PAM type: YTN; PAM sequence: TTT
accacaagtatcagagtgag

SEQ ID NO: 403769 - DNA, 20 bp, Artificial Sequence
  Description of Artificial Sequence: Synthetic oligonucleotide
  Target: LAMA2; (+) strand; PAM type: YTN; PAM sequence: TTA
ccacaagtatcagagtgaga

SEQ ID NO: 403770 - DNA, 20 bp, Artificial Sequence
  Description of Artificial Sequence: Synthetic oligonucleotide
  Target: LAMA2; (+) strand; PAM type: YTN; PAM sequence: CTT
tggtctcaaaattagactta

SEQ ID NO: 403771 - DNA, 20 bp, Artificial Sequence
  Description of Artificial Sequence: Synthetic oligonucleotide
  Target: LAMA2; (+) strand; PAM type: YTN; PAM sequence: TTT
ggtctcaaaattagacttaa

SEQ ID NO: 403772 - DNA, 20 bp, Artificial Sequence
  Description of Artificial Sequence: Synthetic oligonucleotide
  Target: LAMA2; (+) strand; PAM type: YTN; PAM sequence: TTG
gtctcaaaattagacttaat

SEQ ID NO: 403773 - DNA, 20 bp, Artificial Sequence
  Description of Artificial Sequence: Synthetic oligonucleotide
  Target: LAMA2; (+) strand; PAM type: YTN; PAM sequence: CTC
aaaattagacttaatttgaa

SEQ ID NO: 403774 - DNA, 20 bp, Artificial Sequence
  Description of Artificial Sequence: Synthetic oligonucleotide
  Target: LAMA2; (+) strand; PAM type: YTN; PAM sequence: TTA
gacttaatttgaattggtaa

SEQ ID NO: 403775 - DNA, 20 bp, Artificial Sequence
  Description of Artificial Sequence: Synthetic oligonucleotide
  Target: LAMA2; (+) strand; PAM type: YTN; PAM sequence: CTT
aatttgaattggtaaaatta

SEQ ID NO: 403776 - DNA, 20 bp, Artificial Sequence
  Description of Artificial Sequence: Synthetic oligonucleotide
  Target: LAMA2; (+) strand; PAM type: YTN; PAM sequence: TTA
atttgaattggtaaaattaa

SEQ ID NO: 403777 - DNA, 20 bp, Artificial Sequence
  Description of Artificial Sequence: Synthetic oligonucleotide
  Target: LAMA2; (+) strand; PAM type: YTN; PAM sequence: TTT
gaattggtaaaattaacaaa

SEQ ID NO: 403778 - DNA, 20 bp, Artificial Sequence
  Description of Artificial Sequence: Synthetic oligonucleotide
  Target: LAMA2; (+) strand; PAM type: YTN; PAM sequence: TTG
aattggtaaaattaacaaac

SEQ ID NO: 403779 - DNA, 20 bp, Artificial Sequence
  Description of Artificial Sequence: Synthetic oligonucleotide
  Target: LAMA2; (+) strand; PAM type: YTN; PAM sequence: TTG
gtaaaattaacaaacatgcc

SEQ ID NO: 403780 - DNA, 20 bp, Artificial Sequence
  Description of Artificial Sequence: Synthetic oligonucleotide
  Target: LAMA2; (+) strand; PAM type: YTN; PAM sequence: TTA
acaaacatgcctgagcatta

SEQ ID NO: 403781 - DNA, 20 bp, Artificial Sequence
  Description of Artificial Sequence: Synthetic oligonucleotide
  Target: LAMA2; (+) strand; PAM type: YTN; PAM sequence: CTG
agcattatggactttttttt

SEQ ID NO: 403782 - DNA, 20 bp, Artificial Sequence
  Description of Artificial Sequence: Synthetic oligonucleotide
  Target: LAMA2; (+) strand; PAM type: YTN; PAM sequence: TTA
tggactttttttttttttgc

SEQ ID NO: 403783 - DNA, 20 bp, Artificial Sequence
  Description of Artificial Sequence: Synthetic oligonucleotide
  Target: LAMA2; (+) strand; PAM type: YTN; PAM sequence: CTT
tttttttttttgctttaagg

SEQ ID NO: 403784 - DNA, 20 bp, Artificial Sequence
  Description of Artificial Sequence: Synthetic oligonucleotide
  Target: LAMA2; (+) strand; PAM type: YTN; PAM sequence: TTT
ttttttttttgctttaagga

SEQ ID NO: 403785 - DNA, 20 bp, Artificial Sequence
  Description of Artificial Sequence: Synthetic oligonucleotide
  Target: LAMA2; (+) strand; PAM type: YTN; PAM sequence: TTT
tttttttttgctttaaggat

SEQ ID NO: 403786 - DNA, 20 bp, Artificial Sequence
  Description of Artificial Sequence: Synthetic oligonucleotide
  Target: LAMA2; (+) strand; PAM type: YTN; PAM sequence: TTT
ttttttttgctttaaggata

SEQ ID NO: 403787 - DNA, 20 bp, Artificial Sequence
  Description of Artificial Sequence: Synthetic oligonucleotide
  Target: LAMA2; (+) strand; PAM type: YTN; PAM sequence: TTT
tttttttgctttaaggatat

SEQ ID NO: 403788 - DNA, 20 bp, Artificial Sequence
  Description of Artificial Sequence: Synthetic oligonucleotide
  Target: LAMA2; (+) strand; PAM type: YTN; PAM sequence: TTT
ttttttgctttaaggatata

SEQ ID NO: 403789 - DNA, 20 bp, Artificial Sequence
  Description of Artificial Sequence: Synthetic oligonucleotide
  Target: LAMA2; (+) strand; PAM type: YTN; PAM sequence: TTT
tttttgctttaaggatataa

SEQ ID NO: 403790 - DNA, 20 bp, Artificial Sequence
  Description of Artificial Sequence: Synthetic oligonucleotide
  Target: LAMA2; (+) strand; PAM type: YTN; PAM sequence: TTT
ttttgctttaaggatataaa

SEQ ID NO: 403791 - DNA, 20 bp, Artificial Sequence
  Description of Artificial Sequence: Synthetic oligonucleotide
  Target: LAMA2; (+) strand; PAM type: YTN; PAM sequence: TTT
tttgctttaaggatataaaa

SEQ ID NO: 403792 - DNA, 20 bp, Artificial Sequence
  Description of Artificial Sequence: Synthetic oligonucleotide
  Target: LAMA2; (+) strand; PAM type: YTN; PAM sequence: TTT
ttgctttaaggatataaaaa

SEQ ID NO: 403793 - DNA, 20 bp, Artificial Sequence
  Description of Artificial Sequence: Synthetic oligonucleotide
  Target: LAMA2; (+) strand; PAM type: YTN; PAM sequence: TTT
tgctttaaggatataaaaat

SEQ ID NO: 403794 - DNA, 20 bp, Artificial Sequence
  Description of Artificial Sequence: Synthetic oligonucleotide
  Target: LAMA2; (+) strand; PAM type: YTN; PAM sequence: TTT
gctttaaggatataaaaata

SEQ ID NO: 403795 - DNA, 20 bp, Artificial Sequence
  Description of Artificial Sequence: Synthetic oligonucleotide
  Target: LAMA2; (+) strand; PAM type: YTN; PAM sequence: TTG
ctttaaggatataaaaataa

SEQ ID NO: 403796 - DNA, 20 bp, Artificial Sequence
  Description of Artificial Sequence: Synthetic oligonucleotide
  Target: LAMA2; (+) strand; PAM type: YTN; PAM sequence: CTT
taaggatataaaaataaaat

SEQ ID NO: 403797 - DNA, 20 bp, Artificial Sequence
  Description of Artificial Sequence: Synthetic oligonucleotide
  Target: LAMA2; (+) strand; PAM type: YTN; PAM sequence: TTT
aaggatataaaaataaaata

SEQ ID NO: 403798 - DNA, 20 bp, Artificial Sequence
  Description of Artificial Sequence: Synthetic oligonucleotide
  Target: LAMA2; (+) strand; PAM type: YTN; PAM sequence: TTA
aggatataaaaataaaatat

SEQ ID NO: 403799 - DNA, 20 bp, Artificial Sequence
  Description of Artificial Sequence: Synthetic oligonucleotide
  Target: LAMA2; (+) strand; PAM type: YTN; PAM sequence: TTA
ttttaataatgtataataat

SEQ ID NO: 403800 - DNA, 20 bp, Artificial Sequence
  Description of Artificial Sequence: Synthetic oligonucleotide
  Target: LAMA2; (+) strand; PAM type: YTN; PAM sequence: TTT
taataatgtataataataaa

SEQ ID NO: 403801 - DNA, 20 bp, Artificial Sequence
  Description of Artificial Sequence: Synthetic oligonucleotide
  Target: LAMA2; (+) strand; PAM type: YTN; PAM sequence: TTT
aataatgtataataataaat

SEQ ID NO: 403802 - DNA, 20 bp, Artificial Sequence
  Description of Artificial Sequence: Synthetic oligonucleotide
  Target: LAMA2; (+) strand; PAM type: YTN; PAM sequence: TTA
ataatgtataataataaata

SEQ ID NO: 403803 - DNA, 20 bp, Artificial Sequence
  Description of Artificial Sequence: Synthetic oligonucleotide
  Target: LAMA2; (+) strand; PAM type: YTN; PAM sequence: TTA
tttgacaagtattatcatga

SEQ ID NO: 403804 - DNA, 20 bp, Artificial Sequence
  Description of Artificial Sequence: Synthetic oligonucleotide
  Target: LAMA2; (+) strand; PAM type: YTN; PAM sequence: TTT
gacaagtattatcatgaagc

SEQ ID NO: 403805 - DNA, 20 bp, Artificial Sequence
  Description of Artificial Sequence: Synthetic oligonucleotide
  Target: LAMA2; (+) strand; PAM type: YTN; PAM sequence: TTG
acaagtattatcatgaagct

SEQ ID NO: 403806 - DNA, 20 bp, Artificial Sequence
  Description of Artificial Sequence: Synthetic oligonucleotide
  Target: LAMA2; (+) strand; PAM type: YTN; PAM sequence: TTA
tcatgaagctcctaatcatt

SEQ ID NO: 403807 - DNA, 20 bp, Artificial Sequence
  Description of Artificial Sequence: Synthetic oligonucleotide
  Target: LAMA2; (+) strand; PAM type: YTN; PAM sequence: CTC
ctaatcatttcacatgtctg

SEQ ID NO: 403808 - DNA, 20 bp, Artificial Sequence
  Description of Artificial Sequence: Synthetic oligonucleotide
  Target: LAMA2; (+) strand; PAM type: YTN; PAM sequence: CTA
atcatttcacatgtctgcaa

SEQ ID NO: 403809 - DNA, 20 bp, Artificial Sequence
  Description of Artificial Sequence: Synthetic oligonucleotide
  Target: LAMA2; (+) strand; PAM type: YTN; PAM sequence: TTT
cacatgtctgcaaatggcgc

SEQ ID NO: 403810 - DNA, 20 bp, Artificial Sequence
  Description of Artificial Sequence: Synthetic oligonucleotide
  Target: LAMA2; (+) strand; PAM type: YTN; PAM sequence: TTC
acatgtctgcaaatggcgct

SEQ ID NO: 403811 - DNA, 20 bp, Artificial Sequence
  Description of Artificial Sequence: Synthetic oligonucleotide
  Target: LAMA2; (+) strand; PAM type: YTN; PAM sequence: CTG
caaatggcgcttattgaaaa

SEQ ID NO: 403812 - DNA, 20 bp, Artificial Sequence
  Description of Artificial Sequence: Synthetic oligonucleotide
  Target: LAMA2; (+) strand; PAM type: YTN; PAM sequence: CTT
attgaaaaacactctgctgg

SEQ ID NO: 403813 - DNA, 20 bp, Artificial Sequence
  Description of Artificial Sequence: Synthetic oligonucleotide
  Target: LAMA2; (+) strand; PAM type: YTN; PAM sequence: TTA
ttgaaaaacactctgctggt

SEQ ID NO: 403814 - DNA, 20 bp, Artificial Sequence
  Description of Artificial Sequence: Synthetic oligonucleotide
  Target: LAMA2; (+) strand; PAM type: YTN; PAM sequence: TTG
aaaaacactctgctggtctc

SEQ ID NO: 403815 - DNA, 20 bp, Artificial Sequence
  Description of Artificial Sequence: Synthetic oligonucleotide
  Target: LAMA2; (+) strand; PAM type: YTN; PAM sequence: CTC
tgctggtctcctctttaaag

SEQ ID NO: 403816 - DNA, 20 bp, Artificial Sequence
  Description of Artificial Sequence: Synthetic oligonucleotide
  Target: LAMA2; (+) strand; PAM type: YTN; PAM sequence: CTG
ctggtctcctctttaaaggt

SEQ ID NO: 403817 - DNA, 20 bp, Artificial Sequence
  Description of Artificial Sequence: Synthetic oligonucleotide
  Target: LAMA2; (+) strand; PAM type: YTN; PAM sequence: CTG
gtctcctctttaaaggtgct

SEQ ID NO: 403818 - DNA, 20 bp, Artificial Sequence
  Description of Artificial Sequence: Synthetic oligonucleotide
  Target: LAMA2; (+) strand; PAM type: YTN; PAM sequence: CTC
ctctttaaaggtgctttata

SEQ ID NO: 403819 - DNA, 20 bp, Artificial Sequence
  Description of Artificial Sequence: Synthetic oligonucleotide
  Target: LAMA2; (+) strand; PAM type: YTN; PAM sequence: CTC
tttaaaggtgctttatatct

SEQ ID NO: 403820 - DNA, 20 bp, Artificial Sequence
  Description of Artificial Sequence: Synthetic oligonucleotide
  Target: LAMA2; (+) strand; PAM type: YTN; PAM sequence: CTT
taaaggtgctttatatctga

SEQ ID NO: 403821 - DNA, 20 bp, Artificial Sequence
  Description of Artificial Sequence: Synthetic oligonucleotide
  Target: LAMA2; (+) strand; PAM type: YTN; PAM sequence: TTT
aaaggtgctttatatctgat

SEQ ID NO: 403822 - DNA, 20 bp, Artificial Sequence
  Description of Artificial Sequence: Synthetic oligonucleotide
  Target: LAMA2; (+) strand; PAM type: YTN; PAM sequence: TTA
aaggtgctttatatctgata

SEQ ID NO: 403823 - DNA, 20 bp, Artificial Sequence
  Description of Artificial Sequence: Synthetic oligonucleotide
  Target: LAMA2; (+) strand; PAM type: YTN; PAM sequence: CTT
tatatctgatatctcttgtt

SEQ ID NO: 403824 - DNA, 20 bp, Artificial Sequence
  Description of Artificial Sequence: Synthetic oligonucleotide
  Target: LAMA2; (+) strand; PAM type: YTN; PAM sequence: TTT
atatctgatatctcttgttt

SEQ ID NO: 403825 - DNA, 20 bp, Artificial Sequence
  Description of Artificial Sequence: Synthetic oligonucleotide
  Target: LAMA2; (+) strand; PAM type: YTN; PAM sequence: TTA
tatctgatatctcttgtttt

SEQ ID NO: 403826 - DNA, 20 bp, Artificial Sequence
  Description of Artificial Sequence: Synthetic oligonucleotide
  Target: LAMA2; (+) strand; PAM type: YTN; PAM sequence: CTG
atatctcttgtttttgtatt

SEQ ID NO: 403827 - DNA, 20 bp, Artificial Sequence
  Description of Artificial Sequence: Synthetic oligonucleotide
  Target: LAMA2; (+) strand; PAM type: YTN; PAM sequence: CTC
ttgtttttgtatttctctga

SEQ ID NO: 403828 - DNA, 20 bp, Artificial Sequence
  Description of Artificial Sequence: Synthetic oligonucleotide
  Target: LAMA2; (+) strand; PAM type: YTN; PAM sequence: CTT
gtttttgtatttctctgaac

SEQ ID NO: 403829 - DNA, 20 bp, Artificial Sequence
  Description of Artificial Sequence: Synthetic oligonucleotide
  Target: LAMA2; (+) strand; PAM type: YTN; PAM sequence: TTG
tttttgtatttctctgaact

SEQ ID NO: 403830 - DNA, 20 bp, Artificial Sequence
  Description of Artificial Sequence: Synthetic oligonucleotide
  Target: LAMA2; (+) strand; PAM type: YTN; PAM sequence: TTT
ttgtatttctctgaactaga

SEQ ID NO: 403831 - DNA, 20 bp, Artificial Sequence
  Description of Artificial Sequence: Synthetic oligonucleotide
  Target: LAMA2; (+) strand; PAM type: YTN; PAM sequence: TTT
tgtatttctctgaactagat

SEQ ID NO: 403832 - DNA, 20 bp, Artificial Sequence
  Description of Artificial Sequence: Synthetic oligonucleotide
  Target: LAMA2; (+) strand; PAM type: YTN; PAM sequence: TTT
gtatttctctgaactagatt

SEQ ID NO: 403833 - DNA, 20 bp, Artificial Sequence
  Description of Artificial Sequence: Synthetic oligonucleotide
  Target: LAMA2; (+) strand; PAM type: YTN; PAM sequence: TTG
tatttctctgaactagattg

SEQ ID NO: 403834 - DNA, 20 bp, Artificial Sequence
  Description of Artificial Sequence: Synthetic oligonucleotide
  Target: LAMA2; (+) strand; PAM type: YTN; PAM sequence: TTT
ctctgaactagattgacttt

SEQ ID NO: 403835 - DNA, 20 bp, Artificial Sequence
  Description of Artificial Sequence: Synthetic oligonucleotide
  Target: LAMA2; (+) strand; PAM type: YTN; PAM sequence: TTC
tctgaactagattgactttc

SEQ ID NO: 403836 - DNA, 20 bp, Artificial Sequence
  Description of Artificial Sequence: Synthetic oligonucleotide
  Target: LAMA2; (+) strand; PAM type: YTN; PAM sequence: CTC
tgaactagattgactttctg

SEQ ID NO: 403837 - DNA, 20 bp, Artificial Sequence
  Description of Artificial Sequence: Synthetic oligonucleotide
  Target: LAMA2; (+) strand; PAM type: YTN; PAM sequence: CTG
aactagattgactttctggc

SEQ ID NO: 403838 - DNA, 20 bp, Artificial Sequence
  Description of Artificial Sequence: Synthetic oligonucleotide
  Target: LAMA2; (+) strand; PAM type: YTN; PAM sequence: CTA
gattgactttctggctatag

SEQ ID NO: 403839 - DNA, 20 bp, Artificial Sequence
  Description of Artificial Sequence: Synthetic oligonucleotide
  Target: LAMA2; (+) strand; PAM type: YTN; PAM sequence: TTG
actttctggctatagaaatg

SEQ ID NO: 403840 - DNA, 20 bp, Artificial Sequence
  Description of Artificial Sequence: Synthetic oligonucleotide
  Target: LAMA2; (+) strand; PAM type: YTN; PAM sequence: CTT
tctggctatagaaatgcgta

SEQ ID NO: 403841 - DNA, 20 bp, Artificial Sequence
  Description of Artificial Sequence: Synthetic oligonucleotide
  Target: LAMA2; (+) strand; PAM type: YTN; PAM sequence: TTT
ctggctatagaaatgcgtaa

SEQ ID NO: 403842 - DNA, 20 bp, Artificial Sequence
  Description of Artificial Sequence: Synthetic oligonucleotide
  Target: LAMA2; (+) strand; PAM type: YTN; PAM sequence: TTC
tggctatagaaatgcgtaaa

SEQ ID NO: 403843 - DNA, 20 bp, Artificial Sequence
  Description of Artificial Sequence: Synthetic oligonucleotide
  Target: LAMA2; (+) strand; PAM type: YTN; PAM sequence: CTG
gctatagaaatgcgtaaagg

SEQ ID NO: 403844 - DNA, 20 bp, Artificial Sequence
  Description of Artificial Sequence: Synthetic oligonucleotide
  Target: LAMA2; (+) strand; PAM type: YTN; PAM sequence: CTA
tagaaatgcgtaaaggcaaa

SEQ ID NO: 403845 - DNA, 20 bp, Artificial Sequence
  Description of Artificial Sequence: Synthetic oligonucleotide
  Target: LAMA2; (+) strand; PAM type: YTN; PAM sequence: CTT
cctctgggatgttggatctg

SEQ ID NO: 403846 - DNA, 20 bp, Artificial Sequence
  Description of Artificial Sequence: Synthetic oligonucleotide
  Target: LAMA2; (+) strand; PAM type: YTN; PAM sequence: TTC
ctctgggatgttggatctgg

SEQ ID NO: 403847 - DNA, 20 bp, Artificial Sequence
  Description of Artificial Sequence: Synthetic oligonucleotide
  Target: LAMA2; (+) strand; PAM type: YTN; PAM sequence: CTC
tgggatgttggatctggagt

SEQ ID NO: 403848 - DNA, 20 bp, Artificial Sequence
  Description of Artificial Sequence: Synthetic oligonucleotide
  Target: LAMA2; (+) strand; PAM type: YTN; PAM sequence: CTG
ggatgttggatctggagttg

SEQ ID NO: 403849 - DNA, 20 bp, Artificial Sequence
  Description of Artificial Sequence: Synthetic oligonucleotide
  Target: LAMA2; (+) strand; PAM type: YTN; PAM sequence: TTG
gatctggagttggacgtgta

SEQ ID NO: 403850 - DNA, 20 bp, Artificial Sequence
  Description of Artificial Sequence: Synthetic oligonucleotide
  Target: LAMA2; (+) strand; PAM type: YTN; PAM sequence: CTG
gagttggacgtgtagagtac

SEQ ID NO: 403851 - DNA, 20 bp, Artificial Sequence
  Description of Artificial Sequence: Synthetic oligonucleotide
  Target: LAMA2; (+) strand; PAM type: YTN; PAM sequence: TTG
gacgtgtagagtacccagat

SEQ ID NO: 403852 - DNA, 20 bp, Artificial Sequence
  Description of Artificial Sequence: Synthetic oligonucleotide
  Target: LAMA2; (+) strand; PAM type: YTN; PAM sequence: TTT
gactattgatgactcatatt

SEQ ID NO: 403853 - DNA, 20 bp, Artificial Sequence
  Description of Artificial Sequence: Synthetic oligonucleotide
  Target: LAMA2; (+) strand; PAM type: YTN; PAM sequence: TTG
actattgatgactcatattg

SEQ ID NO: 403854 - DNA, 20 bp, Artificial Sequence
  Description of Artificial Sequence: Synthetic oligonucleotide
  Target: LAMA2; (+) strand; PAM type: YTN; PAM sequence: CTA
ttgatgactcatattggtac

SEQ ID NO: 403855 - DNA, 20 bp, Artificial Sequence
  Description of Artificial Sequence: Synthetic oligonucleotide
  Target: LAMA2; (+) strand; PAM type: YTN; PAM sequence: TTG
atgactcatattggtaccgt

SEQ ID NO: 403856 - DNA, 20 bp, Artificial Sequence
  Description of Artificial Sequence: Synthetic oligonucleotide
  Target: LAMA2; (+) strand; PAM type: YTN; PAM sequence: CTC
atattggtaccgtatcgtag

SEQ ID NO: 403857 - DNA, 20 bp, Artificial Sequence
  Description of Artificial Sequence: Synthetic oligonucleotide
  Target: LAMA2; (+) strand; PAM type: YTN; PAM sequence: TTG
gtaccgtatcgtagcatcaa

SEQ ID NO: 403858 - DNA, 20 bp, Artificial Sequence
  Description of Artificial Sequence: Synthetic oligonucleotide
  Target: LAMA2; (+) strand; PAM type: YTN; PAM sequence: CTT
aataaagattaagataatta

SEQ ID NO: 403859 - DNA, 20 bp, Artificial Sequence
  Description of Artificial Sequence: Synthetic oligonucleotide
  Target: LAMA2; (+) strand; PAM type: YTN; PAM sequence: TTA
ataaagattaagataattaa

SEQ ID NO: 403860 - DNA, 20 bp, Artificial Sequence
  Description of Artificial Sequence: Synthetic oligonucleotide
  Target: LAMA2; (+) strand; PAM type: YTN; PAM sequence: TTA
agataattaaatgatagaat

SEQ ID NO: 403861 - DNA, 20 bp, Artificial Sequence
  Description of Artificial Sequence: Synthetic oligonucleotide
  Target: LAMA2; (+) strand; PAM type: YTN; PAM sequence: TTA
aatgatagaattttgaagta

SEQ ID NO: 403862 - DNA, 20 bp, Artificial Sequence
  Description of Artificial Sequence: Synthetic oligonucleotide
  Target: LAMA2; (+) strand; PAM type: YTN; PAM sequence: TTT
tgaagtagtttcccagttta

SEQ ID NO: 403863 - DNA, 20 bp, Artificial Sequence
  Description of Artificial Sequence: Synthetic oligonucleotide
  Target: LAMA2; (+) strand; PAM type: YTN; PAM sequence: TTT
gaagtagtttcccagtttat

SEQ ID NO: 403864 - DNA, 20 bp, Artificial Sequence
  Description of Artificial Sequence: Synthetic oligonucleotide
  Target: LAMA2; (+) strand; PAM type: YTN; PAM sequence: TTG
aagtagtttcccagtttata

SEQ ID NO: 403865 - DNA, 20 bp, Artificial Sequence
  Description of Artificial Sequence: Synthetic oligonucleotide
  Target: LAMA2; (+) strand; PAM type: YTN; PAM sequence: TTT
cccagtttataagaaaactc

SEQ ID NO: 403866 - DNA, 20 bp, Artificial Sequence
  Description of Artificial Sequence: Synthetic oligonucleotide
  Target: LAMA2; (+) strand; PAM type: YTN; PAM sequence: TTC
ccagtttataagaaaactcc

SEQ ID NO: 403867 - DNA, 20 bp, Artificial Sequence
  Description of Artificial Sequence: Synthetic oligonucleotide
  Target: LAMA2; (+) strand; PAM type: YTN; PAM sequence: TTT
ataagaaaactcctatttcc

SEQ ID NO: 403868 - DNA, 20 bp, Artificial Sequence
  Description of Artificial Sequence: Synthetic oligonucleotide
  Target: LAMA2; (+) strand; PAM type: YTN; PAM sequence: TTA
taagaaaactcctatttcca

SEQ ID NO: 403869 - DNA, 20 bp, Artificial Sequence
  Description of Artificial Sequence: Synthetic oligonucleotide
  Target: LAMA2; (+) strand; PAM type: YTN; PAM sequence: CTC
ctatttccatttcaataagg

SEQ ID NO: 403870 - DNA, 20 bp, Artificial Sequence
  Description of Artificial Sequence: Synthetic oligonucleotide
  Target: LAMA2; (+) strand; PAM type: YTN; PAM sequence: CTA
tttccatttcaataaggtaa

SEQ ID NO: 403871 - DNA, 20 bp, Artificial Sequence
  Description of Artificial Sequence: Synthetic oligonucleotide
  Target: LAMA2; (+) strand; PAM type: YTN; PAM sequence: TTT
ccatttcaataaggtaactg

SEQ ID NO: 403872 - DNA, 20 bp, Artificial Sequence
  Description of Artificial Sequence: Synthetic oligonucleotide
  Target: LAMA2; (+) strand; PAM type: YTN; PAM sequence: TTC
catttcaataaggtaactgt

SEQ ID NO: 403873 - DNA, 20 bp, Artificial Sequence
  Description of Artificial Sequence: Synthetic oligonucleotide
  Target: LAMA2; (+) strand; PAM type: YTN; PAM sequence: TTT
caataaggtaactgtgtatg

SEQ ID NO: 403874 - DNA, 20 bp, Artificial Sequence
  Description of Artificial Sequence: Synthetic oligonucleotide
  Target: LAMA2; (+) strand; PAM type: YTN; PAM sequence: TTC
aataaggtaactgtgtatgc

SEQ ID NO: 403875 - DNA, 20 bp, Artificial Sequence
  Description of Artificial Sequence: Synthetic oligonucleotide
  Target: LAMA2; (+) strand; PAM type: YTN; PAM sequence: CTG
tgtatgcatgtaaacacatg

SEQ ID NO: 403876 - DNA, 20 bp, Artificial Sequence
  Description of Artificial Sequence: Synthetic oligonucleotide
  Target: LAMA2; (+) strand; PAM type: YTN; PAM sequence: TTT
tatacatgtctgggagtggg

SEQ ID NO: 403877 - DNA, 20 bp, Artificial Sequence
  Description of Artificial Sequence: Synthetic oligonucleotide
  Target: LAMA2; (+) strand; PAM type: YTN; PAM sequence: TTT
atacatgtctgggagtgggt

SEQ ID NO: 403878 - DNA, 20 bp, Artificial Sequence
  Description of Artificial Sequence: Synthetic oligonucleotide
  Target: LAMA2; (+) strand; PAM type: YTN; PAM sequence: TTA
tacatgtctgggagtgggta

SEQ ID NO: 403879 - DNA, 20 bp, Artificial Sequence
  Description of Artificial Sequence: Synthetic oligonucleotide
  Target: LAMA2; (+) strand; PAM type: YTN; PAM sequence: CTG
ggagtgggtatgtttgtcat

SEQ ID NO: 403880 - DNA, 20 bp, Artificial Sequence
  Description of Artificial Sequence: Synthetic oligonucleotide
  Target: LAMA2; (+) strand; PAM type: YTN; PAM sequence: TTT
gtcatacttcttaggaactg

SEQ ID NO: 403881 - DNA, 20 bp, Artificial Sequence
  Description of Artificial Sequence: Synthetic oligonucleotide
  Target: LAMA2; (+) strand; PAM type: YTN; PAM sequence: TTG
tcatacttcttaggaactga

SEQ ID NO: 403882 - DNA, 20 bp, Artificial Sequence
  Description of Artificial Sequence: Synthetic oligonucleotide
  Target: LAMA2; (+) strand; PAM type: YTN; PAM sequence: CTT
cttaggaactgacaaacctt

SEQ ID NO: 403883 - DNA, 20 bp, Artificial Sequence
  Description of Artificial Sequence: Synthetic oligonucleotide
  Target: LAMA2; (+) strand; PAM type: YTN; PAM sequence: TTC
ttaggaactgacaaaccttc

SEQ ID NO: 403884 - DNA, 20 bp, Artificial Sequence
  Description of Artificial Sequence: Synthetic oligonucleotide
  Target: LAMA2; (+) strand; PAM type: YTN; PAM sequence: CTT
aggaactgacaaaccttcca

SEQ ID NO: 403885 - DNA, 20 bp, Artificial Sequence
  Description of Artificial Sequence: Synthetic oligonucleotide
  Target: LAMA2; (+) strand; PAM type: YTN; PAM sequence: TTA
ggaactgacaaaccttccag

SEQ ID NO: 403886 - DNA, 20 bp, Artificial Sequence
  Description of Artificial Sequence: Synthetic oligonucleotide
  Target: LAMA2; (+) strand; PAM type: YTN; PAM sequence: CTG
acaaaccttccaggtattga

SEQ ID NO: 403887 - DNA, 20 bp, Artificial Sequence
  Description of Artificial Sequence: Synthetic oligonucleotide
  Target: LAMA2; (+) strand; PAM type: YTN; PAM sequence: CTT
ccaggtattgaccagaggaa

SEQ ID NO: 403888 - DNA, 20 bp, Artificial Sequence
  Description of Artificial Sequence: Synthetic oligonucleotide
  Target: LAMA2; (+) strand; PAM type: YTN; PAM sequence: TTC
caggtattgaccagaggaac

SEQ ID NO: 403889 - DNA, 20 bp, Artificial Sequence
  Description of Artificial Sequence: Synthetic oligonucleotide
  Target: LAMA2; (+) strand; PAM type: YTN; PAM sequence: TTG
accagaggaacaactccatt

SEQ ID NO: 403890 - DNA, 20 bp, Artificial Sequence
  Description of Artificial Sequence: Synthetic oligonucleotide
  Target: LAMA2; (+) strand; PAM type: YTN; PAM sequence: CTC
catttctgaccccttcatct

SEQ ID NO: 403891 - DNA, 20 bp, Artificial Sequence
  Description of Artificial Sequence: Synthetic oligonucleotide
  Target: LAMA2; (+) strand; PAM type: YTN; PAM sequence: TTT
ctgaccccttcatcttgtgt

SEQ ID NO: 403892 - DNA, 20 bp, Artificial Sequence
  Description of Artificial Sequence: Synthetic oligonucleotide
  Target: LAMA2; (+) strand; PAM type: YTN; PAM sequence: TTC
tgaccccttcatcttgtgtc

SEQ ID NO: 403893 - DNA, 20 bp, Artificial Sequence
  Description of Artificial Sequence: Synthetic oligonucleotide
  Target: LAMA2; (+) strand; PAM type: YTN; PAM sequence: CTG
accccttcatcttgtgtctg

SEQ ID NO: 403894 - DNA, 20 bp, Artificial Sequence
  Description of Artificial Sequence: Synthetic oligonucleotide
  Target: LAMA2; (+) strand; PAM type: YTN; PAM sequence: CTT
catcttgtgtctggtaggaa

SEQ ID NO: 403895 - DNA, 20 bp, Artificial Sequence
  Description of Artificial Sequence: Synthetic oligonucleotide
  Target: LAMA2; (+) strand; PAM type: YTN; PAM sequence: TTC
atcttgtgtctggtaggaat

SEQ ID NO: 403896 - DNA, 20 bp, Artificial Sequence
  Description of Artificial Sequence: Synthetic oligonucleotide
  Target: LAMA2; (+) strand; PAM type: YTN; PAM sequence: CTT
gtgtctggtaggaatttggg

SEQ ID NO: 403897 - DNA, 20 bp, Artificial Sequence
  Description of Artificial Sequence: Synthetic oligonucleotide
  Target: LAMA2; (+) strand; PAM type: YTN; PAM sequence: TTG
tgtctggtaggaatttgggg

SEQ ID NO: 403898 - DNA, 20 bp, Artificial Sequence
  Description of Artificial Sequence: Synthetic oligonucleotide
  Target: LAMA2; (+) strand; PAM type: YTN; PAM sequence: CTG
gtaggaatttgggggtgtcg

SEQ ID NO: 403899 - DNA, 20 bp, Artificial Sequence
  Description of Artificial Sequence: Synthetic oligonucleotide
  Target: LAMA2; (+) strand; PAM type: YTN; PAM sequence: TTT
gggggtgtcgctgtttcagg

SEQ ID NO: 403900 - DNA, 20 bp, Artificial Sequence
  Description of Artificial Sequence: Synthetic oligonucleotide
  Target: LAMA2; (+) strand; PAM type: YTN; PAM sequence: TTG
ggggtgtcgctgtttcaggc

SEQ ID NO: 403901 - DNA, 20 bp, Artificial Sequence
  Description of Artificial Sequence: Synthetic oligonucleotide
  Target: LAMA2; (+) strand; PAM type: YTN; PAM sequence: CTG
tttcaggcttcctattttgc

SEQ ID NO: 403902 - DNA, 20 bp, Artificial Sequence
  Description of Artificial Sequence: Synthetic oligonucleotide
  Target: LAMA2; (+) strand; PAM type: YTN; PAM sequence: TTT
caggcttcctattttgcctg

SEQ ID NO: 403903 - DNA, 20 bp, Artificial Sequence
  Description of Artificial Sequence: Synthetic oligonucleotide
  Target: LAMA2; (+) strand; PAM type: YTN; PAM sequence: TTC
aggcttcctattttgcctga

SEQ ID NO: 403904 - DNA, 20 bp, Artificial Sequence
  Description of Artificial Sequence: Synthetic oligonucleotide
  Target: LAMA2; (+) strand; PAM type: YTN; PAM sequence: CTT
cctattttgcctgaagaaag

SEQ ID NO: 403905 - DNA, 20 bp, Artificial Sequence
  Description of Artificial Sequence: Synthetic oligonucleotide
  Target: LAMA2; (+) strand; PAM type: YTN; PAM sequence: TTC
ctattttgcctgaagaaagt

SEQ ID NO: 403906 - DNA, 20 bp, Artificial Sequence
  Description of Artificial Sequence: Synthetic oligonucleotide
  Target: LAMA2; (+) strand; PAM type: YTN; PAM sequence: CTA
ttttgcctgaagaaagtact

SEQ ID NO: 403907 - DNA, 20 bp, Artificial Sequence
  Description of Artificial Sequence: Synthetic oligonucleotide
  Target: LAMA2; (+) strand; PAM type: YTN; PAM sequence: TTT
tgcctgaagaaagtactgcc

SEQ ID NO: 403908 - DNA, 20 bp, Artificial Sequence
  Description of Artificial Sequence: Synthetic oligonucleotide
  Target: LAMA2; (+) strand; PAM type: YTN; PAM sequence: TTT
gcctgaagaaagtactgcca

SEQ ID NO: 403909 - DNA, 20 bp, Artificial Sequence
  Description of Artificial Sequence: Synthetic oligonucleotide
  Target: LAMA2; (+) strand; PAM type: YTN; PAM sequence: TTG
cctgaagaaagtactgccac

SEQ ID NO: 403910 - DNA, 20 bp, Artificial Sequence
  Description of Artificial Sequence: Synthetic oligonucleotide
  Target: LAMA2; (+) strand; PAM type: YTN; PAM sequence: CTG
aagaaagtactgccacttat

SEQ ID NO: 403911 - DNA, 20 bp, Artificial Sequence
  Description of Artificial Sequence: Synthetic oligonucleotide
  Target: LAMA2; (+) strand; PAM type: YTN; PAM sequence: CTG
ccacttattcttatgcaata

SEQ ID NO: 403912 - DNA, 20 bp, Artificial Sequence
  Description of Artificial Sequence: Synthetic oligonucleotide
  Target: LAMA2; (+) strand; PAM type: YTN; PAM sequence: CTT
attcttatgcaatacaagcc

SEQ ID NO: 403913 - DNA, 20 bp, Artificial Sequence
  Description of Artificial Sequence: Synthetic oligonucleotide
  Target: LAMA2; (+) strand; PAM type: YTN; PAM sequence: TTA
ttcttatgcaatacaagcca

SEQ ID NO: 403914 - DNA, 20 bp, Artificial Sequence
  Description of Artificial Sequence: Synthetic oligonucleotide
  Target: LAMA2; (+) strand; PAM type: YTN; PAM sequence: TTC
ttatgcaatacaagccaaag

SEQ ID NO: 403915 - DNA, 20 bp, Artificial Sequence
  Description of Artificial Sequence: Synthetic oligonucleotide
  Target: LAMA2; (+) strand; PAM type: YTN; PAM sequence: CTT
atgcaatacaagccaaagca

SEQ ID NO: 403916 - DNA, 20 bp, Artificial Sequence
  Description of Artificial Sequence: Synthetic oligonucleotide
  Target: LAMA2; (+) strand; PAM type: YTN; PAM sequence: TTA
tgcaatacaagccaaagcat

SEQ ID NO: 403917 - DNA, 20 bp, Artificial Sequence
  Description of Artificial Sequence: Synthetic oligonucleotide
  Target: LAMA2; (+) strand; PAM type: YTN; PAM sequence: TTA
ttgcttgtctttgttgtaca

SEQ ID NO: 403918 - DNA, 20 bp, Artificial Sequence
  Description of Artificial Sequence: Synthetic oligonucleotide
  Target: LAMA2; (+) strand; PAM type: YTN; PAM sequence: TTG
cttgtctttgttgtacacag

SEQ ID NO: 403919 - DNA, 20 bp, Artificial Sequence
  Description of Artificial Sequence: Synthetic oligonucleotide
  Target: LAMA2; (+) strand; PAM type: YTN; PAM sequence: CTT
gtctttgttgtacacagctc

SEQ ID NO: 403920 - DNA, 20 bp, Artificial Sequence
  Description of Artificial Sequence: Synthetic oligonucleotide
  Target: LAMA2; (+) strand; PAM type: YTN; PAM sequence: TTG
tctttgttgtacacagctcc

SEQ ID NO: 403921 - DNA, 20 bp, Artificial Sequence
  Description of Artificial Sequence: Synthetic oligonucleotide
  Target: LAMA2; (+) strand; PAM type: YTN; PAM sequence: CTT
tgttgtacacagctcctcct

SEQ ID NO: 403922 - DNA, 20 bp, Artificial Sequence
  Description of Artificial Sequence: Synthetic oligonucleotide
  Target: LAMA2; (+) strand; PAM type: YTN; PAM sequence: TTT
gttgtacacagctcctcctt

SEQ ID NO: 403923 - DNA, 20 bp, Artificial Sequence
  Description of Artificial Sequence: Synthetic oligonucleotide
  Target: LAMA2; (+) strand; PAM type: YTN; PAM sequence: TTG
ttgtacacagctcctccttt

SEQ ID NO: 403924 - DNA, 20 bp, Artificial Sequence
  Description of Artificial Sequence: Synthetic oligonucleotide
  Target: LAMA2; (+) strand; PAM type: YTN; PAM sequence: TTG
tacacagctcctcctttagt

SEQ ID NO: 403925 - DNA, 20 bp, Artificial Sequence
  Description of Artificial Sequence: Synthetic oligonucleotide
  Target: LAMA2; (+) strand; PAM type: YTN; PAM sequence: CTC
ctcctttagtctacatagcc

SEQ ID NO: 403926 - DNA, 20 bp, Artificial Sequence
  Description of Artificial Sequence: Synthetic oligonucleotide
  Target: LAMA2; (+) strand; PAM type: YTN; PAM sequence: CTC
ctttagtctacatagccacc

SEQ ID NO: 403927 - DNA, 20 bp, Artificial Sequence
  Description of Artificial Sequence: Synthetic oligonucleotide
  Target: LAMA2; (+) strand; PAM type: YTN; PAM sequence: CTT
tagtctacatagccaccata

SEQ ID NO: 403928 - DNA, 20 bp, Artificial Sequence
  Description of Artificial Sequence: Synthetic oligonucleotide
  Target: LAMA2; (+) strand; PAM type: YTN; PAM sequence: TTT
agtctacatagccaccatag

SEQ ID NO: 403929 - DNA, 20 bp, Artificial Sequence
  Description of Artificial Sequence: Synthetic oligonucleotide
  Target: LAMA2; (+) strand; PAM type: YTN; PAM sequence: TTA
gtctacatagccaccataga

SEQ ID NO: 403930 - DNA, 20 bp, Artificial Sequence
  Description of Artificial Sequence: Synthetic oligonucleotide
  Target: LAMA2; (+) strand; PAM type: YTN; PAM sequence: CTA
catagccaccatagaaaaat

SEQ ID NO: 403931 - DNA, 20 bp, Artificial Sequence
  Description of Artificial Sequence: Synthetic oligonucleotide
  Target: LAMA2; (+) strand; PAM type: YTN; PAM sequence: TTT
caaaacactgaaattcttat

SEQ ID NO: 403932 - DNA, 20 bp, Artificial Sequence
  Description of Artificial Sequence: Synthetic oligonucleotide
  Target: LAMA2; (+) strand; PAM type: YTN; PAM sequence: TTC
aaaacactgaaattcttatg

SEQ ID NO: 403933 - DNA, 20 bp, Artificial Sequence
  Description of Artificial Sequence: Synthetic oligonucleotide
  Target: LAMA2; (+) strand; PAM type: YTN; PAM sequence: CTG
aaattcttatgtaacatacc

SEQ ID NO: 403934 - DNA, 20 bp, Artificial Sequence
  Description of Artificial Sequence: Synthetic oligonucleotide
  Target: LAMA2; (+) strand; PAM type: YTN; PAM sequence: TTC
ttatgtaacataccaggtcc

SEQ ID NO: 403935 - DNA, 20 bp, Artificial Sequence
  Description of Artificial Sequence: Synthetic oligonucleotide
  Target: LAMA2; (+) strand; PAM type: YTN; PAM sequence: CTT
atgtaacataccaggtccac

SEQ ID NO: 403936 - DNA, 20 bp, Artificial Sequence
  Description of Artificial Sequence: Synthetic oligonucleotide
  Target: LAMA2; (+) strand; PAM type: YTN; PAM sequence: TTA
tgtaacataccaggtccacc

SEQ ID NO: 403937 - DNA, 20 bp, Artificial Sequence
  Description of Artificial Sequence: Synthetic oligonucleotide
  Target: LAMA2; (+) strand; PAM type: YTN; PAM sequence: CTA
cttaaaatgggaagtaactg

SEQ ID NO: 403938 - DNA, 20 bp, Artificial Sequence
  Description of Artificial Sequence: Synthetic oligonucleotide
  Target: LAMA2; (+) strand; PAM type: YTN; PAM sequence: CTT
aaaatgggaagtaactgaga

SEQ ID NO: 403939 - DNA, 20 bp, Artificial Sequence
  Description of Artificial Sequence: Synthetic oligonucleotide
  Target: LAMA2; (+) strand; PAM type: YTN; PAM sequence: TTA
aaatgggaagtaactgagaa

SEQ ID NO: 403940 - DNA, 20 bp, Artificial Sequence
  Description of Artificial Sequence: Synthetic oligonucleotide
  Target: LAMA2; (+) strand; PAM type: YTN; PAM sequence: CTG
agaactgattcagttattct

SEQ ID NO: 403941 - DNA, 20 bp, Artificial Sequence
  Description of Artificial Sequence: Synthetic oligonucleotide
  Target: LAMA2; (+) strand; PAM type: YTN; PAM sequence: CTG
attcagttattctatctttg

SEQ ID NO: 403942 - DNA, 20 bp, Artificial Sequence
  Description of Artificial Sequence: Synthetic oligonucleotide
  Target: LAMA2; (+) strand; PAM type: YTN; PAM sequence: TTC
agttattctatctttggagc

SEQ ID NO: 403943 - DNA, 20 bp, Artificial Sequence
  Description of Artificial Sequence: Synthetic oligonucleotide
  Target: LAMA2; (+) strand; PAM type: YTN; PAM sequence: TTA
ttctatctttggagctttaa

SEQ ID NO: 403944 - DNA, 20 bp, Artificial Sequence
  Description of Artificial Sequence: Synthetic oligonucleotide
  Target: LAMA2; (+) strand; PAM type: YTN; PAM sequence: TTC
tatctttggagctttaatgc

SEQ ID NO: 403945 - DNA, 20 bp, Artificial Sequence
  Description of Artificial Sequence: Synthetic oligonucleotide
  Target: LAMA2; (+) strand; PAM type: YTN; PAM sequence: CTA
tctttggagctttaatgcaa

SEQ ID NO: 403946 - DNA, 20 bp, Artificial Sequence
  Description of Artificial Sequence: Synthetic oligonucleotide
  Target: LAMA2; (+) strand; PAM type: YTN; PAM sequence: CTT
tggagctttaatgcaattat

SEQ ID NO: 403947 - DNA, 20 bp, Artificial Sequence
  Description of Artificial Sequence: Synthetic oligonucleotide
  Target: LAMA2; (+) strand; PAM type: YTN; PAM sequence: TTT
ggagctttaatgcaattatc

SEQ ID NO: 403948 - DNA, 20 bp, Artificial Sequence
  Description of Artificial Sequence: Synthetic oligonucleotide
  Target: LAMA2; (+) strand; PAM type: YTN; PAM sequence: TTG
gagctttaatgcaattatca

SEQ ID NO: 403949 - DNA, 20 bp, Artificial Sequence
  Description of Artificial Sequence: Synthetic oligonucleotide
  Target: LAMA2; (+) strand; PAM type: YTN; PAM sequence: CTT
taatgcaattatcaacatct

SEQ ID NO: 403950 - DNA, 20 bp, Artificial Sequence
  Description of Artificial Sequence: Synthetic oligonucleotide
  Target: LAMA2; (+) strand; PAM type: YTN; PAM sequence: TTT
aatgcaattatcaacatcta

SEQ ID NO: 403951 - DNA, 20 bp, Artificial Sequence
  Description of Artificial Sequence: Synthetic oligonucleotide
  Target: LAMA2; (+) strand; PAM type: YTN; PAM sequence: TTA
atgcaattatcaacatctag

SEQ ID NO: 403952 - DNA, 20 bp, Artificial Sequence
  Description of Artificial Sequence: Synthetic oligonucleotide
  Target: LAMA2; (+) strand; PAM type: YTN; PAM sequence: TTA
tcaacatctagtaccatata

SEQ ID NO: 403953 - DNA, 20 bp, Artificial Sequence
  Description of Artificial Sequence: Synthetic oligonucleotide
  Target: LAMA2; (+) strand; PAM type: YTN; PAM sequence: CTA
gtaccatatagattacttat

SEQ ID NO: 403954 - DNA, 20 bp, Artificial Sequence
  Description of Artificial Sequence: Synthetic oligonucleotide
  Target: LAMA2; (+) strand; PAM type: YTN; PAM sequence: TTA
cttatagaactatccctgtc

SEQ ID NO: 403955 - DNA, 20 bp, Artificial Sequence
  Description of Artificial Sequence: Synthetic oligonucleotide
  Target: LAMA2; (+) strand; PAM type: YTN; PAM sequence: CTT
atagaactatccctgtcttc

SEQ ID NO: 403956 - DNA, 20 bp, Artificial Sequence
  Description of Artificial Sequence: Synthetic oligonucleotide
  Target: LAMA2; (+) strand; PAM type: YTN; PAM sequence: TTA
tagaactatccctgtcttca

SEQ ID NO: 403957 - DNA, 20 bp, Artificial Sequence
  Description of Artificial Sequence: Synthetic oligonucleotide
  Target: LAMA2; (+) strand; PAM type: YTN; PAM sequence: CTA
tccctgtcttcagcacttcc

SEQ ID NO: 403958 - DNA, 20 bp, Artificial Sequence
  Description of Artificial Sequence: Synthetic oligonucleotide
  Target: LAMA2; (+) strand; PAM type: YTN; PAM sequence: CTG
tcttcagcacttccctccca

SEQ ID NO: 403959 - DNA, 20 bp, Artificial Sequence
  Description of Artificial Sequence: Synthetic oligonucleotide
  Target: LAMA2; (+) strand; PAM type: YTN; PAM sequence: CTT
cagcacttccctcccatttt

SEQ ID NO: 403960 - DNA, 20 bp, Artificial Sequence
  Description of Artificial Sequence: Synthetic oligonucleotide
  Target: LAMA2; (+) strand; PAM type: YTN; PAM sequence: TTC
agcacttccctcccattttc

SEQ ID NO: 403961 - DNA, 20 bp, Artificial Sequence
  Description of Artificial Sequence: Synthetic oligonucleotide
  Target: LAMA2; (+) strand; PAM type: YTN; PAM sequence: CTT
ccctcccattttctcttctt

SEQ ID NO: 403962 - DNA, 20 bp, Artificial Sequence
  Description of Artificial Sequence: Synthetic oligonucleotide
  Target: LAMA2; (+) strand; PAM type: YTN; PAM sequence: TTC
cctcccattttctcttcttg

SEQ ID NO: 403963 - DNA, 20 bp, Artificial Sequence
  Description of Artificial Sequence: Synthetic oligonucleotide
  Target: LAMA2; (+) strand; PAM type: YTN; PAM sequence: CTC
ccattttctcttcttgtttt

SEQ ID NO: 403964 - DNA, 20 bp, Artificial Sequence
  Description of Artificial Sequence: Synthetic oligonucleotide
  Target: LAMA2; (+) strand; PAM type: YTN; PAM sequence: TTT
tctcttcttgttttcccaat

SEQ ID NO: 403965 - DNA, 20 bp, Artificial Sequence
  Description of Artificial Sequence: Synthetic oligonucleotide
  Target: LAMA2; (+) strand; PAM type: YTN; PAM sequence: TTT
ctcttcttgttttcccaatt

SEQ ID NO: 403966 - DNA, 20 bp, Artificial Sequence
  Description of Artificial Sequence: Synthetic oligonucleotide
  Target: LAMA2; (+) strand; PAM type: YTN; PAM sequence: TTC
tcttcttgttttcccaattc

SEQ ID NO: 403967 - DNA, 20 bp, Artificial Sequence
  Description of Artificial Sequence: Synthetic oligonucleotide
  Target: LAMA2; (+) strand; PAM type: YTN; PAM sequence: CTC
ttcttgttttcccaattctc

SEQ ID NO: 403968 - DNA, 20 bp, Artificial Sequence
  Description of Artificial Sequence: Synthetic oligonucleotide
  Target: LAMA2; (+) strand; PAM type: YTN; PAM sequence: CTT
cttgttttcccaattctcaa

SEQ ID NO: 403969 - DNA, 20 bp, Artificial Sequence
  Description of Artificial Sequence: Synthetic oligonucleotide
  Target: LAMA2; (+) strand; PAM type: YTN; PAM sequence: TTC
ttgttttcccaattctcaac

SEQ ID NO: 403970 - DNA, 20 bp, Artificial Sequence
  Description of Artificial Sequence: Synthetic oligonucleotide
  Target: LAMA2; (+) strand; PAM type: YTN; PAM sequence: CTT
gttttcccaattctcaactc

SEQ ID NO: 403971 - DNA, 20 bp, Artificial Sequence
  Description of Artificial Sequence: Synthetic oligonucleotide
  Target: LAMA2; (+) strand; PAM type: YTN; PAM sequence: TTG
ttttcccaattctcaactcc

SEQ ID NO: 403972 - DNA, 20 bp, Artificial Sequence
  Description of Artificial Sequence: Synthetic oligonucleotide
  Target: LAMA2; (+) strand; PAM type: YTN; PAM sequence: TTT
tcccaattctcaactccctg

SEQ ID NO: 403973 - DNA, 20 bp, Artificial Sequence
  Description of Artificial Sequence: Synthetic oligonucleotide
  Target: LAMA2; (+) strand; PAM type: YTN; PAM sequence: TTT
cccaattctcaactccctgt

SEQ ID NO: 403974 - DNA, 20 bp, Artificial Sequence
  Description of Artificial Sequence: Synthetic oligonucleotide
  Target: LAMA2; (+) strand; PAM type: YTN; PAM sequence: TTC
ccaattctcaactccctgtt

SEQ ID NO: 403975 - DNA, 20 bp, Artificial Sequence
  Description of Artificial Sequence: Synthetic oligonucleotide
  Target: LAMA2; (+) strand; PAM type: YTN; PAM sequence: TTC
tcaactccctgttaaaccca

SEQ ID NO: 403976 - DNA, 20 bp, Artificial Sequence
  Description of Artificial Sequence: Synthetic oligonucleotide
  Target: LAMA2; (+) strand; PAM type: YTN; PAM sequence: CTC
aactccctgttaaacccaaa

SEQ ID NO: 403977 - DNA, 20 bp, Artificial Sequence
  Description of Artificial Sequence: Synthetic oligonucleotide
  Target: LAMA2; (+) strand; PAM type: YTN; PAM sequence: CTC
cctgttaaacccaaagcagc

SEQ ID NO: 403978 - DNA, 20 bp, Artificial Sequence
  Description of Artificial Sequence: Synthetic oligonucleotide
  Target: LAMA2; (+) strand; PAM type: YTN; PAM sequence: CTG
ttaaacccaaagcagctaac

SEQ ID NO: 403979 - DNA, 20 bp, Artificial Sequence
  Description of Artificial Sequence: Synthetic oligonucleotide
  Target: LAMA2; (+) strand; PAM type: YTN; PAM sequence: TTA
aacccaaagcagctaacagt

SEQ ID NO: 403980 - DNA, 20 bp, Artificial Sequence
  Description of Artificial Sequence: Synthetic oligonucleotide
  Target: LAMA2; (+) strand; PAM type: YTN; PAM sequence: CTA
acagttgaaaggtatggtta

SEQ ID NO: 403981 - DNA, 20 bp, Artificial Sequence
  Description of Artificial Sequence: Synthetic oligonucleotide
  Target: LAMA2; (+) strand; PAM type: YTN; PAM sequence: TTG
aaaggtatggttaagggcct

SEQ ID NO: 403982 - DNA, 20 bp, Artificial Sequence
  Description of Artificial Sequence: Synthetic oligonucleotide
  Target: LAMA2; (+) strand; PAM type: YTN; PAM sequence: TTA
agggcctagggctagacatg

SEQ ID NO: 403983 - DNA, 20 bp, Artificial Sequence
  Description of Artificial Sequence: Synthetic oligonucleotide
  Target: LAMA2; (+) strand; PAM type: YTN; PAM sequence: CTA
gggctagacatgaagctgat

SEQ ID NO: 403984 - DNA, 20 bp, Artificial Sequence
  Description of Artificial Sequence: Synthetic oligonucleotide
  Target: LAMA2; (+) strand; PAM type: YTN; PAM sequence: CTA
gacatgaagctgatcagaga

SEQ ID NO: 403985 - DNA, 20 bp, Artificial Sequence
  Description of Artificial Sequence: Synthetic oligonucleotide
  Target: LAMA2; (+) strand; PAM type: YTN; PAM sequence: CTG
atcagagacagagaagactt

SEQ ID NO: 403986 - DNA, 20 bp, Artificial Sequence
  Description of Artificial Sequence: Synthetic oligonucleotide
  Target: LAMA2; (+) strand; PAM type: YTN; PAM sequence: CTT
aaagaactggttaattgttg

SEQ ID NO: 403987 - DNA, 20 bp, Artificial Sequence
  Description of Artificial Sequence: Synthetic oligonucleotide
  Target: LAMA2; (+) strand; PAM type: YTN; PAM sequence: TTA
aagaactggttaattgttga

SEQ ID NO: 403988 - DNA, 20 bp, Artificial Sequence
  Description of Artificial Sequence: Synthetic oligonucleotide
  Target: LAMA2; (+) strand; PAM type: YTN; PAM sequence: CTG
gttaattgttgactctgggt

SEQ ID NO: 403989 - DNA, 20 bp, Artificial Sequence
  Description of Artificial Sequence: Synthetic oligonucleotide
  Target: LAMA2; (+) strand; PAM type: YTN; PAM sequence: TTA
attgttgactctgggtgata

SEQ ID NO: 403990 - DNA, 20 bp, Artificial Sequence
  Description of Artificial Sequence: Synthetic oligonucleotide
  Target: LAMA2; (+) strand; PAM type: YTN; PAM sequence: TTG
ttgactctgggtgatacata

SEQ ID NO: 403991 - DNA, 20 bp, Artificial Sequence
  Description of Artificial Sequence: Synthetic oligonucleotide
  Target: LAMA2; (+) strand; PAM type: YTN; PAM sequence: TTG
actctgggtgatacatagag

SEQ ID NO: 403992 - DNA, 20 bp, Artificial Sequence
  Description of Artificial Sequence: Synthetic oligonucleotide
  Target: LAMA2; (+) strand; PAM type: YTN; PAM sequence: CTC
tgggtgatacatagagtttc

SEQ ID NO: 403993 - DNA, 20 bp, Artificial Sequence
  Description of Artificial Sequence: Synthetic oligonucleotide
  Target: LAMA2; (+) strand; PAM type: YTN; PAM sequence: CTG
ggtgatacatagagtttcat

SEQ ID NO: 403994 - DNA, 20 bp, Artificial Sequence
  Description of Artificial Sequence: Synthetic oligonucleotide
  Target: LAMA2; (+) strand; PAM type: YTN; PAM sequence: TTT
catgctgtttgtagatactt

SEQ ID NO: 403995 - DNA, 20 bp, Artificial Sequence
  Description of Artificial Sequence: Synthetic oligonucleotide
  Target: LAMA2; (+) strand; PAM type: YTN; PAM sequence: TTC
atgctgtttgtagatactta

SEQ ID NO: 403996 - DNA, 20 bp, Artificial Sequence
  Description of Artificial Sequence: Synthetic oligonucleotide
  Target: LAMA2; (+) strand; PAM type: YTN; PAM sequence: CTG
tttgtagatacttaattttt

SEQ ID NO: 403997 - DNA, 20 bp, Artificial Sequence
  Description of Artificial Sequence: Synthetic oligonucleotide
  Target: LAMA2; (+) strand; PAM type: YTN; PAM sequence: TTT
gtagatacttaattttttcc

SEQ ID NO: 403998 - DNA, 20 bp, Artificial Sequence
  Description of Artificial Sequence: Synthetic oligonucleotide
  Target: LAMA2; (+) strand; PAM type: YTN; PAM sequence: TTG
tagatacttaattttttcca

SEQ ID NO: 403999 - DNA, 20 bp, Artificial Sequence
  Description of Artificial Sequence: Synthetic oligonucleotide
  Target: LAMA2; (+) strand; PAM type: YTN; PAM sequence: CTT
aattttttccataataaaaa

SEQ ID NO: 404000 - DNA, 20 bp, Artificial Sequence
  Description of Artificial Sequence: Synthetic oligonucleotide
  Target: LAMA2; (+) strand; PAM type: YTN; PAM sequence: TTA
attttttccataataaaaag

SEQ ID NO: 404001 - DNA, 20 bp, Artificial Sequence
  Description of Artificial Sequence: Synthetic oligonucleotide
  Target: LAMA2; (+) strand; PAM type: YTN; PAM sequence: TTT
tttccataataaaaagttta

SEQ ID NO: 404002 - DNA, 20 bp, Artificial Sequence
  Description of Artificial Sequence: Synthetic oligonucleotide
  Target: LAMA2; (+) strand; PAM type: YTN; PAM sequence: TTT
ttccataataaaaagtttaa

SEQ ID NO: 404003 - DNA, 20 bp, Artificial Sequence
  Description of Artificial Sequence: Synthetic oligonucleotide
  Target: LAMA2; (+) strand; PAM type: YTN; PAM sequence: TTT
tccataataaaaagtttaaa

SEQ ID NO: 404004 - DNA, 20 bp, Artificial Sequence
  Description of Artificial Sequence: Synthetic oligonucleotide
  Target: LAMA2; (+) strand; PAM type: YTN; PAM sequence: TTT
ccataataaaaagtttaaaa

SEQ ID NO: 404005 - DNA, 20 bp, Artificial Sequence
  Description of Artificial Sequence: Synthetic oligonucleotide
  Target: LAMA2; (+) strand; PAM type: YTN; PAM sequence: TTC
cataataaaaagtttaaaag

SEQ ID NO: 404006 - DNA, 20 bp, Artificial Sequence
  Description of Artificial Sequence: Synthetic oligonucleotide
  Target: LAMA2; (+) strand; PAM type: YTN; PAM sequence: TTT
aaaagaaagagccatgtgca

SEQ ID NO: 404007 - DNA, 20 bp, Artificial Sequence
  Description of Artificial Sequence: Synthetic oligonucleotide
  Target: LAMA2; (+) strand; PAM type: YTN; PAM sequence: TTA
aaagaaagagccatgtgcaa

SEQ ID NO: 404008 - DNA, 20 bp, Artificial Sequence
  Description of Artificial Sequence: Synthetic oligonucleotide
  Target: LAMA2; (+) strand; PAM type: YTN; PAM sequence: CTG
tagtcccagctacttgggag

SEQ ID NO: 404009 - DNA, 20 bp, Artificial Sequence
  Description of Artificial Sequence: Synthetic oligonucleotide
  Target: LAMA2; (+) strand; PAM type: YTN; PAM sequence: CTA
cttgggaggctgaggcagga

SEQ ID NO: 404010 - DNA, 20 bp, Artificial Sequence
  Description of Artificial Sequence: Synthetic oligonucleotide
  Target: LAMA2; (+) strand; PAM type: YTN; PAM sequence: CTT
gggaggctgaggcaggagga

SEQ ID NO: 404011 - DNA, 20 bp, Artificial Sequence
  Description of Artificial Sequence: Synthetic oligonucleotide
  Target: LAMA2; (+) strand; PAM type: YTN; PAM sequence: TTG
ggaggctgaggcaggaggat

SEQ ID NO: 404012 - DNA, 20 bp, Artificial Sequence
  Description of Artificial Sequence: Synthetic oligonucleotide
  Target: LAMA2; (+) strand; PAM type: YTN; PAM sequence: CTG
aggcaggaggatcacttcag

SEQ ID NO: 404013 - DNA, 20 bp, Artificial Sequence
  Description of Artificial Sequence: Synthetic oligonucleotide
  Target: LAMA2; (+) strand; PAM type: YTN; PAM sequence: CTT
cagcccaggaattcaaggct

SEQ ID NO: 404014 - DNA, 20 bp, Artificial Sequence
  Description of Artificial Sequence: Synthetic oligonucleotide
  Target: LAMA2; (+) strand; PAM type: YTN; PAM sequence: TTC
agcccaggaattcaaggctg

SEQ ID NO: 404015 - DNA, 20 bp, Artificial Sequence
  Description of Artificial Sequence: Synthetic oligonucleotide
  Target: LAMA2; (+) strand; PAM type: YTN; PAM sequence: TTC
aaggctgtggtccatgatga

SEQ ID NO: 404016 - DNA, 20 bp, Artificial Sequence
  Description of Artificial Sequence: Synthetic oligonucleotide
  Target: LAMA2; (+) strand; PAM type: YTN; PAM sequence: CTG
tggtccatgatgatcatgcc

SEQ ID NO: 404017 - DNA, 20 bp, Artificial Sequence
  Description of Artificial Sequence: Synthetic oligonucleotide
  Target: LAMA2; (+) strand; PAM type: YTN; PAM sequence: CTG
tgaataaccactgcagtcca

SEQ ID NO: 404018 - DNA, 20 bp, Artificial Sequence
  Description of Artificial Sequence: Synthetic oligonucleotide
  Target: LAMA2; (+) strand; PAM type: YTN; PAM sequence: CTG
cagtccagcctgggcaacat

SEQ ID NO: 404019 - DNA, 20 bp, Artificial Sequence
  Description of Artificial Sequence: Synthetic oligonucleotide
  Target: LAMA2; (+) strand; PAM type: YTN; PAM sequence: CTG
ggcaacatagcaagacttca

SEQ ID NO: 404020 - DNA, 20 bp, Artificial Sequence
  Description of Artificial Sequence: Synthetic oligonucleotide
  Target: LAMA2; (+) strand; PAM type: YTN; PAM sequence: CTT
catctcttaaaaaaaaaagt

SEQ ID NO: 404021 - DNA, 20 bp, Artificial Sequence
  Description of Artificial Sequence: Synthetic oligonucleotide
  Target: LAMA2; (+) strand; PAM type: YTN; PAM sequence: TTC
atctcttaaaaaaaaaagtt

SEQ ID NO: 404022 - DNA, 20 bp, Artificial Sequence
  Description of Artificial Sequence: Synthetic oligonucleotide
  Target: LAMA2; (+) strand; PAM type: YTN; PAM sequence: CTC
ttaaaaaaaaaagttataaa

SEQ ID NO: 404023 - DNA, 20 bp, Artificial Sequence
  Description of Artificial Sequence: Synthetic oligonucleotide
  Target: LAMA2; (+) strand; PAM type: YTN; PAM sequence: CTT
aaaaaaaaaagttataaaaa

SEQ ID NO: 404024 - DNA, 20 bp, Artificial Sequence
  Description of Artificial Sequence: Synthetic oligonucleotide
  Target: LAMA2; (+) strand; PAM type: YTN; PAM sequence: TTA
aaaaaaaaagttataaaaaa

SEQ ID NO: 404025 - DNA, 20 bp, Artificial Sequence
  Description of Artificial Sequence: Synthetic oligonucleotide
  Target: LAMA2; (+) strand; PAM type: YTN; PAM sequence: TTA
taaaaaaaaatgagaagcaa

SEQ ID NO: 404026 - DNA, 20 bp, Artificial Sequence
  Description of Artificial Sequence: Synthetic oligonucleotide
  Target: LAMA2; (+) strand; PAM type: YTN; PAM sequence: TTT
ttagttctttttaaggaagt

SEQ ID NO: 404027 - DNA, 20 bp, Artificial Sequence
  Description of Artificial Sequence: Synthetic oligonucleotide
  Target: LAMA2; (+) strand; PAM type: YTN; PAM sequence: TTT
tagttctttttaaggaagtt

SEQ ID NO: 404028 - DNA, 20 bp, Artificial Sequence
  Description of Artificial Sequence: Synthetic oligonucleotide
  Target: LAMA2; (+) strand; PAM type: YTN; PAM sequence: TTT
agttctttttaaggaagttt

SEQ ID NO: 404029 - DNA, 20 bp, Artificial Sequence
  Description of Artificial Sequence: Synthetic oligonucleotide
  Target: LAMA2; (+) strand; PAM type: YTN; PAM sequence: TTA
gttctttttaaggaagtttt

SEQ ID NO: 404030 - DNA, 20 bp, Artificial Sequence
  Description of Artificial Sequence: Synthetic oligonucleotide
  Target: LAMA2; (+) strand; PAM type: YTN; PAM sequence: TTC
tttttaaggaagtttttcag

SEQ ID NO: 404031 - DNA, 20 bp, Artificial Sequence
  Description of Artificial Sequence: Synthetic oligonucleotide
  Target: LAMA2; (+) strand; PAM type: YTN; PAM sequence: CTT
tttaaggaagtttttcagca

SEQ ID NO: 404032 - DNA, 20 bp, Artificial Sequence
  Description of Artificial Sequence: Synthetic oligonucleotide
  Target: LAMA2; (+) strand; PAM type: YTN; PAM sequence: TTT
ttaaggaagtttttcagcaa

SEQ ID NO: 404033 - DNA, 20 bp, Artificial Sequence
  Description of Artificial Sequence: Synthetic oligonucleotide
  Target: LAMA2; (+) strand; PAM type: YTN; PAM sequence: TTT
taaggaagtttttcagcaaa

SEQ ID NO: 404034 - DNA, 20 bp, Artificial Sequence
  Description of Artificial Sequence: Synthetic oligonucleotide
  Target: LAMA2; (+) strand; PAM type: YTN; PAM sequence: TTT
aaggaagtttttcagcaaaa

SEQ ID NO: 404035 - DNA, 20 bp, Artificial Sequence
  Description of Artificial Sequence: Synthetic oligonucleotide
  Target: LAMA2; (+) strand; PAM type: YTN; PAM sequence: TTA
aggaagtttttcagcaaaag

SEQ ID NO: 404036 - DNA, 20 bp, Artificial Sequence
  Description of Artificial Sequence: Synthetic oligonucleotide
  Target: LAMA2; (+) strand; PAM type: YTN; PAM sequence: TTT
ttcagcaaaagtgtgtgtgc

SEQ ID NO: 404037 - DNA, 20 bp, Artificial Sequence
  Description of Artificial Sequence: Synthetic oligonucleotide
  Target: LAMA2; (+) strand; PAM type: YTN; PAM sequence: TTT
tcagcaaaagtgtgtgtgca

SEQ ID NO: 404038 - DNA, 20 bp, Artificial Sequence
  Description of Artificial Sequence: Synthetic oligonucleotide
  Target: LAMA2; (+) strand; PAM type: YTN; PAM sequence: TTT
cagcaaaagtgtgtgtgcat

SEQ ID NO: 404039 - DNA, 20 bp, Artificial Sequence
  Description of Artificial Sequence: Synthetic oligonucleotide
  Target: LAMA2; (+) strand; PAM type: YTN; PAM sequence: TTC
agcaaaagtgtgtgtgcatg

SEQ ID NO: 404040 - DNA, 20 bp, Artificial Sequence
  Description of Artificial Sequence: Synthetic oligonucleotide
  Target: LAMA2; (+) strand; PAM type: YTN; PAM sequence: CTT
gcgtgtttggtggtgttgag

SEQ ID NO: 404041 - DNA, 20 bp, Artificial Sequence
  Description of Artificial Sequence: Synthetic oligonucleotide
  Target: LAMA2; (+) strand; PAM type: YTN; PAM sequence: TTG
cgtgtttggtggtgttgagg

SEQ ID NO: 404042 - DNA, 20 bp, Artificial Sequence
  Description of Artificial Sequence: Synthetic oligonucleotide
  Target: LAMA2; (+) strand; PAM type: YTN; PAM sequence: TTT
ggtggtgttgagggaattaa

SEQ ID NO: 404043 - DNA, 20 bp, Artificial Sequence
  Description of Artificial Sequence: Synthetic oligonucleotide
  Target: LAMA2; (+) strand; PAM type: YTN; PAM sequence: TTG
gtggtgttgagggaattaag

SEQ ID NO: 404044 - DNA, 20 bp, Artificial Sequence
  Description of Artificial Sequence: Synthetic oligonucleotide
  Target: LAMA2; (+) strand; PAM type: YTN; PAM sequence: TTG
agggaattaagtacttaacc

SEQ ID NO: 404045 - DNA, 20 bp, Artificial Sequence
  Description of Artificial Sequence: Synthetic oligonucleotide
  Target: LAMA2; (+) strand; PAM type: YTN; PAM sequence: TTA
agtacttaaccgggtttaag

SEQ ID NO: 404046 - DNA, 20 bp, Artificial Sequence
  Description of Artificial Sequence: Synthetic oligonucleotide
  Target: LAMA2; (+) strand; PAM type: YTN; PAM sequence: CTT
aaccgggtttaaggacattt

SEQ ID NO: 404047 - DNA, 20 bp, Artificial Sequence
  Description of Artificial Sequence: Synthetic oligonucleotide
  Target: LAMA2; (+) strand; PAM type: YTN; PAM sequence: TTA
accgggtttaaggacattta

SEQ ID NO: 404048 - DNA, 20 bp, Artificial Sequence
  Description of Artificial Sequence: Synthetic oligonucleotide
  Target: LAMA2; (+) strand; PAM type: YTN; PAM sequence: TTT
aaggacatttatactcataa

SEQ ID NO: 404049 - DNA, 20 bp, Artificial Sequence
  Description of Artificial Sequence: Synthetic oligonucleotide
  Target: LAMA2; (+) strand; PAM type: YTN; PAM sequence: TTA
aggacatttatactcataaa

SEQ ID NO: 404050 - DNA, 20 bp, Artificial Sequence
  Description of Artificial Sequence: Synthetic oligonucleotide
  Target: LAMA2; (+) strand; PAM type: YTN; PAM sequence: TTT
atactcataaagtgcagttc

SEQ ID NO: 404051 - DNA, 20 bp, Artificial Sequence
  Description of Artificial Sequence: Synthetic oligonucleotide
  Target: LAMA2; (+) strand; PAM type: YTN; PAM sequence: TTA
tactcataaagtgcagttct

SEQ ID NO: 404052 - DNA, 20 bp, Artificial Sequence
  Description of Artificial Sequence: Synthetic oligonucleotide
  Target: LAMA2; (+) strand; PAM type: YTN; PAM sequence: CTC
ataaagtgcagttcttcttt

SEQ ID NO: 404053 - DNA, 20 bp, Artificial Sequence
  Description of Artificial Sequence: Synthetic oligonucleotide
  Target: LAMA2; (+) strand; PAM type: YTN; PAM sequence: TTC
ttctttcagaaaagatacat

SEQ ID NO: 404054 - DNA, 20 bp, Artificial Sequence
  Description of Artificial Sequence: Synthetic oligonucleotide
  Target: LAMA2; (+) strand; PAM type: YTN; PAM sequence: CTT
ctttcagaaaagatacattc

SEQ ID NO: 404055 - DNA, 20 bp, Artificial Sequence
  Description of Artificial Sequence: Synthetic oligonucleotide
  Target: LAMA2; (+) strand; PAM type: YTN; PAM sequence: TTC
tttcagaaaagatacattct

SEQ ID NO: 404056 - DNA, 20 bp, Artificial Sequence
  Description of Artificial Sequence: Synthetic oligonucleotide
  Target: LAMA2; (+) strand; PAM type: YTN; PAM sequence: CTT
tcagaaaagatacattctgt

SEQ ID NO: 404057 - DNA, 20 bp, Artificial Sequence
  Description of Artificial Sequence: Synthetic oligonucleotide
  Target: LAMA2; (+) strand; PAM type: YTN; PAM sequence: TTT
cagaaaagatacattctgtt

SEQ ID NO: 404058 - DNA, 20 bp, Artificial Sequence
  Description of Artificial Sequence: Synthetic oligonucleotide
  Target: LAMA2; (+) strand; PAM type: YTN; PAM sequence: TTC
agaaaagatacattctgtta

SEQ ID NO: 404059 - DNA, 20 bp, Artificial Sequence
  Description of Artificial Sequence: Synthetic oligonucleotide
  Target: LAMA2; (+) strand; PAM type: YTN; PAM sequence: TTC
tgttaaagaaggtgaacctt

SEQ ID NO: 404060 - DNA, 20 bp, Artificial Sequence
  Description of Artificial Sequence: Synthetic oligonucleotide
  Target: LAMA2; (+) strand; PAM type: YTN; PAM sequence: CTG
ttaaagaaggtgaaccttat

SEQ ID NO: 404061 - DNA, 20 bp, Artificial Sequence
  Description of Artificial Sequence: Synthetic oligonucleotide
  Target: LAMA2; (+) strand; PAM type: YTN; PAM sequence: TTA
aagaaggtgaaccttatttg

SEQ ID NO: 404062 - DNA, 20 bp, Artificial Sequence
  Description of Artificial Sequence: Synthetic oligonucleotide
  Target: LAMA2; (+) strand; PAM type: YTN; PAM sequence: CTT
atttgataaattcattcttt

SEQ ID NO: 404063 - DNA, 20 bp, Artificial Sequence
  Description of Artificial Sequence: Synthetic oligonucleotide
  Target: LAMA2; (+) strand; PAM type: YTN; PAM sequence: TTA
tttgataaattcattctttt

SEQ ID NO: 404064 - DNA, 20 bp, Artificial Sequence
  Description of Artificial Sequence: Synthetic oligonucleotide
  Target: LAMA2; (+) strand; PAM type: YTN; PAM sequence: TTT
gataaattcattcttttgtt

SEQ ID NO: 404065 - DNA, 20 bp, Artificial Sequence
  Description of Artificial Sequence: Synthetic oligonucleotide
  Target: LAMA2; (+) strand; PAM type: YTN; PAM sequence: TTG
ataaattcattcttttgtta

SEQ ID NO: 404066 - DNA, 20 bp, Artificial Sequence
  Description of Artificial Sequence: Synthetic oligonucleotide
  Target: LAMA2; (+) strand; PAM type: YTN; PAM sequence: TTC
attcttttgttaccatgtat

SEQ ID NO: 404067 - DNA, 20 bp, Artificial Sequence
  Description of Artificial Sequence: Synthetic oligonucleotide
  Target: LAMA2; (+) strand; PAM type: YTN; PAM sequence: TTC
ttttgttaccatgtatttca

SEQ ID NO: 404068 - DNA, 20 bp, Artificial Sequence
  Description of Artificial Sequence: Synthetic oligonucleotide
  Target: LAMA2; (+) strand; PAM type: YTN; PAM sequence: CTT
ttgttaccatgtatttcact

SEQ ID NO: 404069 - DNA, 20 bp, Artificial Sequence
  Description of Artificial Sequence: Synthetic oligonucleotide
  Target: LAMA2; (+) strand; PAM type: YTN; PAM sequence: TTT
tgttaccatgtatttcactt

SEQ ID NO: 404070 - DNA, 20 bp, Artificial Sequence
  Description of Artificial Sequence: Synthetic oligonucleotide
  Target: LAMA2; (+) strand; PAM type: YTN; PAM sequence: TTT
gttaccatgtatttcactta

SEQ ID NO: 404071 - DNA, 20 bp, Artificial Sequence
  Description of Artificial Sequence: Synthetic oligonucleotide
  Target: LAMA2; (+) strand; PAM type: YTN; PAM sequence: TTG
ttaccatgtatttcacttaa

SEQ ID NO: 404072 - DNA, 20 bp, Artificial Sequence
  Description of Artificial Sequence: Synthetic oligonucleotide
  Target: LAMA2; (+) strand; PAM type: YTN; PAM sequence: TTA
ccatgtatttcacttaacat

SEQ ID NO: 404073 - DNA, 20 bp, Artificial Sequence
  Description of Artificial Sequence: Synthetic oligonucleotide
  Target: LAMA2; (+) strand; PAM type: YTN; PAM sequence: TTT
cacttaacattgcatcctca

SEQ ID NO: 404074 - DNA, 20 bp, Artificial Sequence
  Description of Artificial Sequence: Synthetic oligonucleotide
  Target: LAMA2; (+) strand; PAM type: YTN; PAM sequence: TTC
acttaacattgcatcctcaa

SEQ ID NO: 404075 - DNA, 20 bp, Artificial Sequence
  Description of Artificial Sequence: Synthetic oligonucleotide
  Target: LAMA2; (+) strand; PAM type: YTN; PAM sequence: CTT
aacattgcatcctcaaagaa

SEQ ID NO: 404076 - DNA, 20 bp, Artificial Sequence
  Description of Artificial Sequence: Synthetic oligonucleotide
  Target: LAMA2; (+) strand; PAM type: YTN; PAM sequence: TTA
acattgcatcctcaaagaaa

SEQ ID NO: 404077 - DNA, 20 bp, Artificial Sequence
  Description of Artificial Sequence: Synthetic oligonucleotide
  Target: LAMA2; (+) strand; PAM type: YTN; PAM sequence: TTG
catcctcaaagaaaaaagat

SEQ ID NO: 404078 - DNA, 20 bp, Artificial Sequence
  Description of Artificial Sequence: Synthetic oligonucleotide
  Target: LAMA2; (+) strand; PAM type: YTN; PAM sequence: CTC
aaagaaaaaagattaccaaa

SEQ ID NO: 404079 - DNA, 20 bp, Artificial Sequence
  Description of Artificial Sequence: Synthetic oligonucleotide
  Target: LAMA2; (+) strand; PAM type: YTN; PAM sequence: TTA
ccaaagtgagacagcagtca

SEQ ID NO: 404080 - DNA, 20 bp, Artificial Sequence
  Description of Artificial Sequence: Synthetic oligonucleotide
  Target: LAMA2; (+) strand; PAM type: YTN; PAM sequence: TTT
tgttatgactgcttgtctca

SEQ ID NO: 404081 - DNA, 20 bp, Artificial Sequence
  Description of Artificial Sequence: Synthetic oligonucleotide
  Target: LAMA2; (+) strand; PAM type: YTN; PAM sequence: TTT
gttatgactgcttgtctcaa

SEQ ID NO: 404082 - DNA, 20 bp, Artificial Sequence
  Description of Artificial Sequence: Synthetic oligonucleotide
  Target: LAMA2; (+) strand; PAM type: YTN; PAM sequence: TTG
ttatgactgcttgtctcaaa

SEQ ID NO: 404083 - DNA, 20 bp, Artificial Sequence
  Description of Artificial Sequence: Synthetic oligonucleotide
  Target: LAMA2; (+) strand; PAM type: YTN; PAM sequence: TTA
tgactgcttgtctcaaaaga

SEQ ID NO: 404084 - DNA, 20 bp, Artificial Sequence
  Description of Artificial Sequence: Synthetic oligonucleotide
  Target: LAMA2; (+) strand; PAM type: YTN; PAM sequence: CTG
cttgtctcaaaagagagacc

SEQ ID NO: 404085 - DNA, 20 bp, Artificial Sequence
  Description of Artificial Sequence: Synthetic oligonucleotide
  Target: LAMA2; (+) strand; PAM type: YTN; PAM sequence: CTT
gtctcaaaagagagaccaga

SEQ ID NO: 404086 - DNA, 20 bp, Artificial Sequence
  Description of Artificial Sequence: Synthetic oligonucleotide
  Target: LAMA2; (+) strand; PAM type: YTN; PAM sequence: TTG
tctcaaaagagagaccagat

SEQ ID NO: 404087 - DNA, 20 bp, Artificial Sequence
  Description of Artificial Sequence: Synthetic oligonucleotide
  Target: LAMA2; (+) strand; PAM type: YTN; PAM sequence: CTC
aaaagagagaccagattttc

SEQ ID NO: 404088 - DNA, 20 bp, Artificial Sequence
  Description of Artificial Sequence: Synthetic oligonucleotide
  Target: LAMA2; (+) strand; PAM type: YTN; PAM sequence: TTT
tcatatttaacagctcatgg

SEQ ID NO: 404089 - DNA, 20 bp, Artificial Sequence
  Description of Artificial Sequence: Synthetic oligonucleotide
  Target: LAMA2; (+) strand; PAM type: YTN; PAM sequence: TTT
catatttaacagctcatgga

SEQ ID NO: 404090 - DNA, 20 bp, Artificial Sequence
  Description of Artificial Sequence: Synthetic oligonucleotide
  Target: LAMA2; (+) strand; PAM type: YTN; PAM sequence: TTC
atatttaacagctcatggaa

SEQ ID NO: 404091 - DNA, 20 bp, Artificial Sequence
  Description of Artificial Sequence: Synthetic oligonucleotide
  Target: LAMA2; (+) strand; PAM type: YTN; PAM sequence: TTT
aacagctcatggaaatcaat

SEQ ID NO: 404092 - DNA, 20 bp, Artificial Sequence
  Description of Artificial Sequence: Synthetic oligonucleotide
  Target: LAMA2; (+) strand; PAM type: YTN; PAM sequence: TTA
acagctcatggaaatcaatc

SEQ ID NO: 404093 - DNA, 20 bp, Artificial Sequence
  Description of Artificial Sequence: Synthetic oligonucleotide
  Target: LAMA2; (+) strand; PAM type: YTN; PAM sequence: CTC
atggaaatcaatcacttaaa

SEQ ID NO: 404094 - DNA, 20 bp, Artificial Sequence
  Description of Artificial Sequence: Synthetic oligonucleotide
  Target: LAMA2; (+) strand; PAM type: YTN; PAM sequence: CTT
aaaaaagaaaatgaaataaa

SEQ ID NO: 404095 - DNA, 20 bp, Artificial Sequence
  Description of Artificial Sequence: Synthetic oligonucleotide
  Target: LAMA2; (+) strand; PAM type: YTN; PAM sequence: TTA
aaaaagaaaatgaaataaaa

SEQ ID NO: 404096 - DNA, 20 bp, Artificial Sequence
  Description of Artificial Sequence: Synthetic oligonucleotide
  Target: LAMA2; (+) strand; PAM type: YTN; PAM sequence: CTT
tcaaaattctgttaattgaa

SEQ ID NO: 404097 - DNA, 20 bp, Artificial Sequence
  Description of Artificial Sequence: Synthetic oligonucleotide
  Target: LAMA2; (+) strand; PAM type: YTN; PAM sequence: TTT
caaaattctgttaattgaat

SEQ ID NO: 404098 - DNA, 20 bp, Artificial Sequence
  Description of Artificial Sequence: Synthetic oligonucleotide
  Target: LAMA2; (+) strand; PAM type: YTN; PAM sequence: TTC
aaaattctgttaattgaatt

SEQ ID NO: 404099 - DNA, 20 bp, Artificial Sequence
  Description of Artificial Sequence: Synthetic oligonucleotide
  Target: LAMA2; (+) strand; PAM type: YTN; PAM sequence: TTC
tgttaattgaatttaaaaat

SEQ ID NO: 404100 - DNA, 20 bp, Artificial Sequence
  Description of Artificial Sequence: Synthetic oligonucleotide
  Target: LAMA2; (+) strand; PAM type: YTN; PAM sequence: CTG
ttaattgaatttaaaaatga

SEQ ID NO: 404101 - DNA, 20 bp, Artificial Sequence
  Description of Artificial Sequence: Synthetic oligonucleotide
  Target: LAMA2; (+) strand; PAM type: YTN; PAM sequence: TTA
attgaatttaaaaatgaact

SEQ ID NO: 404102 - DNA, 20 bp, Artificial Sequence
  Description of Artificial Sequence: Synthetic oligonucleotide
  Target: LAMA2; (+) strand; PAM type: YTN; PAM sequence: TTG
aatttaaaaatgaacttcta

SEQ ID NO: 404103 - DNA, 20 bp, Artificial Sequence
  Description of Artificial Sequence: Synthetic oligonucleotide
  Target: LAMA2; (+) strand; PAM type: YTN; PAM sequence: TTT
aaaaatgaacttctatgcaa

SEQ ID NO: 404104 - DNA, 20 bp, Artificial Sequence
  Description of Artificial Sequence: Synthetic oligonucleotide
  Target: LAMA2; (+) strand; PAM type: YTN; PAM sequence: TTA
aaaatgaacttctatgcaat

SEQ ID NO: 404105 - DNA, 20 bp, Artificial Sequence
  Description of Artificial Sequence: Synthetic oligonucleotide
  Target: LAMA2; (+) strand; PAM type: YTN; PAM sequence: CTT
ctatgcaatttgtacactga

SEQ ID NO: 404106 - DNA, 20 bp, Artificial Sequence
  Description of Artificial Sequence: Synthetic oligonucleotide
  Target: LAMA2; (+) strand; PAM type: YTN; PAM sequence: TTC
tatgcaatttgtacactgaa

SEQ ID NO: 404107 - DNA, 20 bp, Artificial Sequence
  Description of Artificial Sequence: Synthetic oligonucleotide
  Target: LAMA2; (+) strand; PAM type: YTN; PAM sequence: CTA
tgcaatttgtacactgaaat

SEQ ID NO: 404108 - DNA, 20 bp, Artificial Sequence
  Description of Artificial Sequence: Synthetic oligonucleotide
  Target: LAMA2; (+) strand; PAM type: YTN; PAM sequence: TTT
gtacactgaaatctgaaggg

SEQ ID NO: 404109 - DNA, 20 bp, Artificial Sequence
  Description of Artificial Sequence: Synthetic oligonucleotide
  Target: LAMA2; (+) strand; PAM type: YTN; PAM sequence: TTG
tacactgaaatctgaagggt

SEQ ID NO: 404110 - DNA, 20 bp, Artificial Sequence
  Description of Artificial Sequence: Synthetic oligonucleotide
  Target: LAMA2; (+) strand; PAM type: YTN; PAM sequence: CTG
aaatctgaagggtggatatt

SEQ ID NO: 404111 - DNA, 20 bp, Artificial Sequence
  Description of Artificial Sequence: Synthetic oligonucleotide
  Target: LAMA2; (+) strand; PAM type: YTN; PAM sequence: CTG
aagggtggatattgtactgt

SEQ ID NO: 404112 - DNA, 20 bp, Artificial Sequence
  Description of Artificial Sequence: Synthetic oligonucleotide
  Target: LAMA2; (+) strand; PAM type: YTN; PAM sequence: TTG
tactgtatacattagtatgc

SEQ ID NO: 404113 - DNA, 20 bp, Artificial Sequence
  Description of Artificial Sequence: Synthetic oligonucleotide
  Target: LAMA2; (+) strand; PAM type: YTN; PAM sequence: CTG
tatacattagtatgctgtgc

SEQ ID NO: 404114 - DNA, 20 bp, Artificial Sequence
  Description of Artificial Sequence: Synthetic oligonucleotide
  Target: LAMA2; (+) strand; PAM type: YTN; PAM sequence: TTA
gtatgctgtgccaaacaata

SEQ ID NO: 404115 - DNA, 20 bp, Artificial Sequence
  Description of Artificial Sequence: Synthetic oligonucleotide
  Target: LAMA2; (+) strand; PAM type: YTN; PAM sequence: CTG
tgccaaacaataaaagatat

SEQ ID NO: 404116 - DNA, 20 bp, Artificial Sequence
  Description of Artificial Sequence: Synthetic oligonucleotide
  Target: LAMA2; (+) strand; PAM type: YTN; PAM sequence: TTC
taggaagactacttcaacaa

SEQ ID NO: 404117 - DNA, 20 bp, Artificial Sequence
  Description of Artificial Sequence: Synthetic oligonucleotide
  Target: LAMA2; (+) strand; PAM type: YTN; PAM sequence: CTA
ggaagactacttcaacaaac

SEQ ID NO: 404118 - DNA, 20 bp, Artificial Sequence
  Description of Artificial Sequence: Synthetic oligonucleotide
  Target: LAMA2; (+) strand; PAM type: YTN; PAM sequence: CTA
cttcaacaaactgggatcca

SEQ ID NO: 404119 - DNA, 20 bp, Artificial Sequence
  Description of Artificial Sequence: Synthetic oligonucleotide
  Target: LAMA2; (+) strand; PAM type: YTN; PAM sequence: CTT
caacaaactgggatccaaga

SEQ ID NO: 404120 - DNA, 20 bp, Artificial Sequence
  Description of Artificial Sequence: Synthetic oligonucleotide
  Target: LAMA2; (+) strand; PAM type: YTN; PAM sequence: TTC
aacaaactgggatccaagat

SEQ ID NO: 404121 - DNA, 20 bp, Artificial Sequence
  Description of Artificial Sequence: Synthetic oligonucleotide
  Target: LAMA2; (+) strand; PAM type: YTN; PAM sequence: CTG
ggatccaagatattataaag

SEQ ID NO: 404122 - DNA, 20 bp, Artificial Sequence
  Description of Artificial Sequence: Synthetic oligonucleotide
  Target: LAMA2; (+) strand; PAM type: YTN; PAM sequence: TTA
taaagaattttaggagaaat

SEQ ID NO: 404123 - DNA, 20 bp, Artificial Sequence
  Description of Artificial Sequence: Synthetic oligonucleotide
  Target: LAMA2; (+) strand; PAM type: YTN; PAM sequence: TTT
taggagaaatcatgcagctt

SEQ ID NO: 404124 - DNA, 20 bp, Artificial Sequence
  Description of Artificial Sequence: Synthetic oligonucleotide
  Target: LAMA2; (+) strand; PAM type: YTN; PAM sequence: TTT
aggagaaatcatgcagctta

SEQ ID NO: 404125 - DNA, 20 bp, Artificial Sequence
  Description of Artificial Sequence: Synthetic oligonucleotide
  Target: LAMA2; (+) strand; PAM type: YTN; PAM sequence: TTA
ggagaaatcatgcagcttat

SEQ ID NO: 404126 - DNA, 20 bp, Artificial Sequence
  Description of Artificial Sequence: Synthetic oligonucleotide
  Target: LAMA2; (+) strand; PAM type: YTN; PAM sequence: CTT
atgatatgaaagggtggctc

SEQ ID NO: 404127 - DNA, 20 bp, Artificial Sequence
  Description of Artificial Sequence: Synthetic oligonucleotide
  Target: LAMA2; (+) strand; PAM type: YTN; PAM sequence: TTA
tgatatgaaagggtggctca

SEQ ID NO: 404128 - DNA, 20 bp, Artificial Sequence
  Description of Artificial Sequence: Synthetic oligonucleotide
  Target: LAMA2; (+) strand; PAM type: YTN; PAM sequence: CTC
atttggggtccactagctga

SEQ ID NO: 404129 - DNA, 20 bp, Artificial Sequence
  Description of Artificial Sequence: Synthetic oligonucleotide
  Target: LAMA2; (+) strand; PAM type: YTN; PAM sequence: TTT
ggggtccactagctgaatta

SEQ ID NO: 404130 - DNA, 20 bp, Artificial Sequence
  Description of Artificial Sequence: Synthetic oligonucleotide
  Target: LAMA2; (+) strand; PAM type: YTN; PAM sequence: TTG
gggtccactagctgaattaa

SEQ ID NO: 404131 - DNA, 20 bp, Artificial Sequence
  Description of Artificial Sequence: Synthetic oligonucleotide
  Target: LAMA2; (+) strand; PAM type: YTN; PAM sequence: CTA
gctgaattaaattagacaaa

SEQ ID NO: 404132 - DNA, 20 bp, Artificial Sequence
  Description of Artificial Sequence: Synthetic oligonucleotide
  Target: LAMA2; (+) strand; PAM type: YTN; PAM sequence: CTG
aattaaattagacaaaatgc

SEQ ID NO: 404133 - DNA, 20 bp, Artificial Sequence
  Description of Artificial Sequence: Synthetic oligonucleotide
  Target: LAMA2; (+) strand; PAM type: YTN; PAM sequence: TTA
aattagacaaaatgctgaat

SEQ ID NO: 404134 - DNA, 20 bp, Artificial Sequence
  Description of Artificial Sequence: Synthetic oligonucleotide
  Target: LAMA2; (+) strand; PAM type: YTN; PAM sequence: TTA
gacaaaatgctgaataaagt

SEQ ID NO: 404135 - DNA, 20 bp, Artificial Sequence
  Description of Artificial Sequence: Synthetic oligonucleotide
  Target: LAMA2; (+) strand; PAM type: YTN; PAM sequence: CTG
aataaagtaatataaacttg

SEQ ID NO: 404136 - DNA, 20 bp, Artificial Sequence
  Description of Artificial Sequence: Synthetic oligonucleotide
  Target: LAMA2; (+) strand; PAM type: YTN; PAM sequence: CTT
gcataaattgtatgtgttgg

SEQ ID NO: 404137 - DNA, 20 bp, Artificial Sequence
  Description of Artificial Sequence: Synthetic oligonucleotide
  Target: LAMA2; (+) strand; PAM type: YTN; PAM sequence: TTG
cataaattgtatgtgttggt

SEQ ID NO: 404138 - DNA, 20 bp, Artificial Sequence
  Description of Artificial Sequence: Synthetic oligonucleotide
  Target: LAMA2; (+) strand; PAM type: YTN; PAM sequence: TTG
tatgtgttggtaaatagtaa

SEQ ID NO: 404139 - DNA, 20 bp, Artificial Sequence
  Description of Artificial Sequence: Synthetic oligonucleotide
  Target: LAMA2; (+) strand; PAM type: YTN; PAM sequence: TTG
gtaaatagtaaattattatg

SEQ ID NO: 404140 - DNA, 20 bp, Artificial Sequence
  Description of Artificial Sequence: Synthetic oligonucleotide
  Target: LAMA2; (+) strand; PAM type: YTN; PAM sequence: TTA
ttatgtaagccataggaaaa

SEQ ID NO: 404141 - DNA, 20 bp, Artificial Sequence
  Description of Artificial Sequence: Synthetic oligonucleotide
  Target: LAMA2; (+) strand; PAM type: YTN; PAM sequence: TTA
tgtaagccataggaaaaagg

SEQ ID NO: 404142 - DNA, 20 bp, Artificial Sequence
  Description of Artificial Sequence: Synthetic oligonucleotide
  Target: LAMA2; (+) strand; PAM type: YTN; PAM sequence: CTT
tccacttaaccaatagcaat

SEQ ID NO: 404143 - DNA, 20 bp, Artificial Sequence
  Description of Artificial Sequence: Synthetic oligonucleotide
  Target: LAMA2; (+) strand; PAM type: YTN; PAM sequence: TTT
ccacttaaccaatagcaatt

SEQ ID NO: 404144 - DNA, 20 bp, Artificial Sequence
  Description of Artificial Sequence: Synthetic oligonucleotide
  Target: LAMA2; (+) strand; PAM type: YTN; PAM sequence: TTC
cacttaaccaatagcaattc

SEQ ID NO: 404145 - DNA, 20 bp, Artificial Sequence
  Description of Artificial Sequence: Synthetic oligonucleotide
  Target: LAMA2; (+) strand; PAM type: YTN; PAM sequence: CTT
aaccaatagcaattccatca

SEQ ID NO: 404146 - DNA, 20 bp, Artificial Sequence
  Description of Artificial Sequence: Synthetic oligonucleotide
  Target: LAMA2; (+) strand; PAM type: YTN; PAM sequence: TTA
accaatagcaattccatcag

SEQ ID NO: 404147 - DNA, 20 bp, Artificial Sequence
  Description of Artificial Sequence: Synthetic oligonucleotide
  Target: LAMA2; (+) strand; PAM type: YTN; PAM sequence: TTC
catcagttaactgctgctgt

SEQ ID NO: 404148 - DNA, 20 bp, Artificial Sequence
  Description of Artificial Sequence: Synthetic oligonucleotide
  Target: LAMA2; (+) strand; PAM type: YTN; PAM sequence: TTA
actgctgctgtgtcatttca

SEQ ID NO: 404149 - DNA, 20 bp, Artificial Sequence
  Description of Artificial Sequence: Synthetic oligonucleotide
  Target: LAMA2; (+) strand; PAM type: YTN; PAM sequence: CTG
ctgctgtgtcatttcatgtc

SEQ ID NO: 404150 - DNA, 20 bp, Artificial Sequence
  Description of Artificial Sequence: Synthetic oligonucleotide
  Target: LAMA2; (+) strand; PAM type: YTN; PAM sequence: CTG
ctgtgtcatttcatgtcaat

SEQ ID NO: 404151 - DNA, 20 bp, Artificial Sequence
  Description of Artificial Sequence: Synthetic oligonucleotide
  Target: LAMA2; (+) strand; PAM type: YTN; PAM sequence: CTG
tgtcatttcatgtcaatgaa

SEQ ID NO: 404152 - DNA, 20 bp, Artificial Sequence
  Description of Artificial Sequence: Synthetic oligonucleotide
  Target: LAMA2; (+) strand; PAM type: YTN; PAM sequence: TTT
catgtcaatgaacacacaca

SEQ ID NO: 404153 - DNA, 20 bp, Artificial Sequence
  Description of Artificial Sequence: Synthetic oligonucleotide
  Target: LAMA2; (+) strand; PAM type: YTN; PAM sequence: TTC
atgtcaatgaacacacacag

SEQ ID NO: 404154 - DNA, 20 bp, Artificial Sequence
  Description of Artificial Sequence: Synthetic oligonucleotide
  Target: LAMA2; (+) strand; PAM type: YTN; PAM sequence: CTG
gtgctcactggttctggttg

SEQ ID NO: 404155 - DNA, 20 bp, Artificial Sequence
  Description of Artificial Sequence: Synthetic oligonucleotide
  Target: LAMA2; (+) strand; PAM type: YTN; PAM sequence: CTC
actggttctggttgaaactg

SEQ ID NO: 404156 - DNA, 20 bp, Artificial Sequence
  Description of Artificial Sequence: Synthetic oligonucleotide
  Target: LAMA2; (+) strand; PAM type: YTN; PAM sequence: CTG
gttctggttgaaactgatgt

SEQ ID NO: 404157 - DNA, 20 bp, Artificial Sequence
  Description of Artificial Sequence: Synthetic oligonucleotide
  Target: LAMA2; (+) strand; PAM type: YTN; PAM sequence: TTC
tggttgaaactgatgtaagt

SEQ ID NO: 404158 - DNA, 20 bp, Artificial Sequence
  Description of Artificial Sequence: Synthetic oligonucleotide
  Target: LAMA2; (+) strand; PAM type: YTN; PAM sequence: CTG
gttgaaactgatgtaagtgt

SEQ ID NO: 404159 - DNA, 20 bp, Artificial Sequence
  Description of Artificial Sequence: Synthetic oligonucleotide
  Target: LAMA2; (+) strand; PAM type: YTN; PAM sequence: TTG
aaactgatgtaagtgttgag

SEQ ID NO: 404160 - DNA, 20 bp, Artificial Sequence
  Description of Artificial Sequence: Synthetic oligonucleotide
  Target: LAMA2; (+) strand; PAM type: YTN; PAM sequence: CTG
atgtaagtgttgagccaaga

SEQ ID NO: 404161 - DNA, 20 bp, Artificial Sequence
  Description of Artificial Sequence: Synthetic oligonucleotide
  Target: LAMA2; (+) strand; PAM type: YTN; PAM sequence: TTG
agccaagatcagactctgag

SEQ ID NO: 404162 - DNA, 20 bp, Artificial Sequence
  Description of Artificial Sequence: Synthetic oligonucleotide
  Target: LAMA2; (+) strand; PAM type: YTN; PAM sequence: CTC
tgagtattgattcgagatct

SEQ ID NO: 404163 - DNA, 20 bp, Artificial Sequence
  Description of Artificial Sequence: Synthetic oligonucleotide
  Target: LAMA2; (+) strand; PAM type: YTN; PAM sequence: CTG
agtattgattcgagatctaa

SEQ ID NO: 404164 - DNA, 20 bp, Artificial Sequence
  Description of Artificial Sequence: Synthetic oligonucleotide
  Target: LAMA2; (+) strand; PAM type: YTN; PAM sequence: TTG
attcgagatctaatgaattt

SEQ ID NO: 404165 - DNA, 20 bp, Artificial Sequence
  Description of Artificial Sequence: Synthetic oligonucleotide
  Target: LAMA2; (+) strand; PAM type: YTN; PAM sequence: TTC
gagatctaatgaatttggaa

SEQ ID NO: 404166 - DNA, 20 bp, Artificial Sequence
  Description of Artificial Sequence: Synthetic oligonucleotide
  Target: LAMA2; (+) strand; PAM type: YTN; PAM sequence: CTA
atgaatttggaatgttagaa

SEQ ID NO: 404167 - DNA, 20 bp, Artificial Sequence
  Description of Artificial Sequence: Synthetic oligonucleotide
  Target: LAMA2; (+) strand; PAM type: YTN; PAM sequence: TTT
ggaatgttagaaactaaaca

SEQ ID NO: 404168 - DNA, 20 bp, Artificial Sequence
  Description of Artificial Sequence: Synthetic oligonucleotide
  Target: LAMA2; (+) strand; PAM type: YTN; PAM sequence: TTG
gaatgttagaaactaaacag

SEQ ID NO: 404169 - DNA, 20 bp, Artificial Sequence
  Description of Artificial Sequence: Synthetic oligonucleotide
  Target: LAMA2; (+) strand; PAM type: YTN; PAM sequence: TTA
gaaactaaacagccagtttt

SEQ ID NO: 404170 - DNA, 20 bp, Artificial Sequence
  Description of Artificial Sequence: Synthetic oligonucleotide
  Target: LAMA2; (+) strand; PAM type: YTN; PAM sequence: CTA
aacagccagttttctcttaa

SEQ ID NO: 404171 - DNA, 20 bp, Artificial Sequence
  Description of Artificial Sequence: Synthetic oligonucleotide
  Target: LAMA2; (+) strand; PAM type: YTN; PAM sequence: TTT
tctcttaaattcttaaaaac

SEQ ID NO: 404172 - DNA, 20 bp, Artificial Sequence
  Description of Artificial Sequence: Synthetic oligonucleotide
  Target: LAMA2; (+) strand; PAM type: YTN; PAM sequence: TTT
ctcttaaattcttaaaaaca

SEQ ID NO: 404173 - DNA, 20 bp, Artificial Sequence
  Description of Artificial Sequence: Synthetic oligonucleotide
  Target: LAMA2; (+) strand; PAM type: YTN; PAM sequence: TTC
tcttaaattcttaaaaacaa

SEQ ID NO: 404174 - DNA, 20 bp, Artificial Sequence
  Description of Artificial Sequence: Synthetic oligonucleotide
  Target: LAMA2; (+) strand; PAM type: YTN; PAM sequence: CTC
ttaaattcttaaaaacaagt

SEQ ID NO: 404175 - DNA, 20 bp, Artificial Sequence
  Description of Artificial Sequence: Synthetic oligonucleotide
  Target: LAMA2; (+) strand; PAM type: YTN; PAM sequence: CTT
aaattcttaaaaacaagtct

SEQ ID NO: 404176 - DNA, 20 bp, Artificial Sequence
  Description of Artificial Sequence: Synthetic oligonucleotide
  Target: LAMA2; (+) strand; PAM type: YTN; PAM sequence: TTA
aattcttaaaaacaagtctc

SEQ ID NO: 404177 - DNA, 20 bp, Artificial Sequence
  Description of Artificial Sequence: Synthetic oligonucleotide
  Target: LAMA2; (+) strand; PAM type: YTN; PAM sequence: TTC
ttaaaaacaagtctccgcat

SEQ ID NO: 404178 - DNA, 20 bp, Artificial Sequence
  Description of Artificial Sequence: Synthetic oligonucleotide
  Target: LAMA2; (+) strand; PAM type: YTN; PAM sequence: CTT
aaaaacaagtctccgcattt

SEQ ID NO: 404179 - DNA, 20 bp, Artificial Sequence
  Description of Artificial Sequence: Synthetic oligonucleotide
  Target: LAMA2; (+) strand; PAM type: YTN; PAM sequence: TTA
aaaacaagtctccgcatttt

SEQ ID NO: 404180 - DNA, 20 bp, Artificial Sequence
  Description of Artificial Sequence: Synthetic oligonucleotide
  Target: LAMA2; (+) strand; PAM type: YTN; PAM sequence: CTC
cgcattttatatcttttaaa

SEQ ID NO: 404181 - DNA, 20 bp, Artificial Sequence
  Description of Artificial Sequence: Synthetic oligonucleotide
  Target: LAMA2; (+) strand; PAM type: YTN; PAM sequence: TTT
tatatcttttaaatctggaa

SEQ ID NO: 404182 - DNA, 20 bp, Artificial Sequence
  Description of Artificial Sequence: Synthetic oligonucleotide
  Target: LAMA2; (+) strand; PAM type: YTN; PAM sequence: TTT
atatcttttaaatctggaat

SEQ ID NO: 404183 - DNA, 20 bp, Artificial Sequence
  Description of Artificial Sequence: Synthetic oligonucleotide
  Target: LAMA2; (+) strand; PAM type: YTN; PAM sequence: TTA
tatcttttaaatctggaatt

SEQ ID NO: 404184 - DNA, 20 bp, Artificial Sequence
  Description of Artificial Sequence: Synthetic oligonucleotide
  Target: LAMA2; (+) strand; PAM type: YTN; PAM sequence: CTT
ttaaatctggaattaccaga

SEQ ID NO: 404185 - DNA, 20 bp, Artificial Sequence
  Description of Artificial Sequence: Synthetic oligonucleotide
  Target: LAMA2; (+) strand; PAM type: YTN; PAM sequence: TTT
taaatctggaattaccagaa

SEQ ID NO: 404186 - DNA, 20 bp, Artificial Sequence
  Description of Artificial Sequence: Synthetic oligonucleotide
  Target: LAMA2; (+) strand; PAM type: YTN; PAM sequence: TTT
aaatctggaattaccagaaa

SEQ ID NO: 404187 - DNA, 20 bp, Artificial Sequence
  Description of Artificial Sequence: Synthetic oligonucleotide
  Target: LAMA2; (+) strand; PAM type: YTN; PAM sequence: TTA
aatctggaattaccagaaat

SEQ ID NO: 404188 - DNA, 20 bp, Artificial Sequence
  Description of Artificial Sequence: Synthetic oligonucleotide
  Target: LAMA2; (+) strand; PAM type: YTN; PAM sequence: CTG
gaattaccagaaatgtgatg

SEQ ID NO: 404189 - DNA, 20 bp, Artificial Sequence
  Description of Artificial Sequence: Synthetic oligonucleotide
  Target: LAMA2; (+) strand; PAM type: YTN; PAM sequence: TTA
ccagaaatgtgatgcatatt

SEQ ID NO: 404190 - DNA, 20 bp, Artificial Sequence
  Description of Artificial Sequence: Synthetic oligonucleotide
  Target: LAMA2; (+) strand; PAM type: YTN; PAM sequence: TTT
cattttctgtatgttcctcc

SEQ ID NO: 404191 - DNA, 20 bp, Artificial Sequence
  Description of Artificial Sequence: Synthetic oligonucleotide
  Target: LAMA2; (+) strand; PAM type: YTN; PAM sequence: TTC
attttctgtatgttcctccc

SEQ ID NO: 404192 - DNA, 20 bp, Artificial Sequence
  Description of Artificial Sequence: Synthetic oligonucleotide
  Target: LAMA2; (+) strand; PAM type: YTN; PAM sequence: TTT
tctgtatgttcctccccttc

SEQ ID NO: 404193 - DNA, 20 bp, Artificial Sequence
  Description of Artificial Sequence: Synthetic oligonucleotide
  Target: LAMA2; (+) strand; PAM type: YTN; PAM sequence: TTT
ctgtatgttcctccccttca

SEQ ID NO: 404194 - DNA, 20 bp, Artificial Sequence
  Description of Artificial Sequence: Synthetic oligonucleotide
  Target: LAMA2; (+) strand; PAM type: YTN; PAM sequence: TTC
tgtatgttcctccccttcac

SEQ ID NO: 404195 - DNA, 20 bp, Artificial Sequence
  Description of Artificial Sequence: Synthetic oligonucleotide
  Target: LAMA2; (+) strand; PAM type: YTN; PAM sequence: CTG
tatgttcctccccttcactt

SEQ ID NO: 404196 - DNA, 20 bp, Artificial Sequence
  Description of Artificial Sequence: Synthetic oligonucleotide
  Target: LAMA2; (+) strand; PAM type: YTN; PAM sequence: TTC
ctccccttcacttcaacacg

SEQ ID NO: 404197 - DNA, 20 bp, Artificial Sequence
  Description of Artificial Sequence: Synthetic oligonucleotide
  Target: LAMA2; (+) strand; PAM type: YTN; PAM sequence: CTC
cccttcacttcaacacgtac

SEQ ID NO: 404198 - DNA, 20 bp, Artificial Sequence
  Description of Artificial Sequence: Synthetic oligonucleotide
  Target: LAMA2; (+) strand; PAM type: YTN; PAM sequence: CTT
cacttcaacacgtacccttg

SEQ ID NO: 404199 - DNA, 20 bp, Artificial Sequence
  Description of Artificial Sequence: Synthetic oligonucleotide
  Target: LAMA2; (+) strand; PAM type: YTN; PAM sequence: TTC
acttcaacacgtacccttga

SEQ ID NO: 404200 - DNA, 20 bp, Artificial Sequence
  Description of Artificial Sequence: Synthetic oligonucleotide
  Target: LAMA2; (+) strand; PAM type: YTN; PAM sequence: CTT
caacacgtacccttgaagaa

SEQ ID NO: 404201 - DNA, 20 bp, Artificial Sequence
  Description of Artificial Sequence: Synthetic oligonucleotide
  Target: LAMA2; (+) strand; PAM type: YTN; PAM sequence: TTC
aacacgtacccttgaagaac

SEQ ID NO: 404202 - DNA, 20 bp, Artificial Sequence
  Description of Artificial Sequence: Synthetic oligonucleotide
  Target: LAMA2; (+) strand; PAM type: YTN; PAM sequence: CTT
gaagaactgggagaaatgga

SEQ ID NO: 404203 - DNA, 20 bp, Artificial Sequence
  Description of Artificial Sequence: Synthetic oligonucleotide
  Target: LAMA2; (+) strand; PAM type: YTN; PAM sequence: TTG
aagaactgggagaaatggaa

SEQ ID NO: 404204 - DNA, 20 bp, Artificial Sequence
  Description of Artificial Sequence: Synthetic oligonucleotide
  Target: LAMA2; (+) strand; PAM type: YTN; PAM sequence: CTG
ggagaaatggaactatttct

SEQ ID NO: 404205 - DNA, 20 bp, Artificial Sequence
  Description of Artificial Sequence: Synthetic oligonucleotide
  Target: LAMA2; (+) strand; PAM type: YTN; PAM sequence: CTA
tttctgtgagagccctggat

SEQ ID NO: 404206 - DNA, 20 bp, Artificial Sequence
  Description of Artificial Sequence: Synthetic oligonucleotide
  Target: LAMA2; (+) strand; PAM type: YTN; PAM sequence: TTT
ctgtgagagccctggatgga

SEQ ID NO: 404207 - DNA, 20 bp, Artificial Sequence
  Description of Artificial Sequence: Synthetic oligonucleotide
  Target: LAMA2; (+) strand; PAM type: YTN; PAM sequence: TTC
tgtgagagccctggatggac

SEQ ID NO: 404208 - DNA, 20 bp, Artificial Sequence
  Description of Artificial Sequence: Synthetic oligonucleotide
  Target: LAMA2; (+) strand; PAM type: YTN; PAM sequence: CTG
tgagagccctggatggaccc

SEQ ID NO: 404209 - DNA, 20 bp, Artificial Sequence
  Description of Artificial Sequence: Synthetic oligonucleotide
  Target: LAMA2; (+) strand; PAM type: YTN; PAM sequence: CTG
gatggacccaaagccagcat

SEQ ID NO: 404210 - DNA, 20 bp, Artificial Sequence
  Description of Artificial Sequence: Synthetic oligonucleotide
  Target: LAMA2; (+) strand; PAM type: YTN; PAM sequence: TTG
tgcccagcacacaccattcg

SEQ ID NO: 404211 - DNA, 20 bp, Artificial Sequence
  Description of Artificial Sequence: Synthetic oligonucleotide
  Target: LAMA2; (+) strand; PAM type: YTN; PAM sequence: TTC
gacgtctcctccagggtaca

SEQ ID NO: 404212 - DNA, 20 bp, Artificial Sequence
  Description of Artificial Sequence: Synthetic oligonucleotide
  Target: LAMA2; (+) strand; PAM type: YTN; PAM sequence: CTC
ctccagggtacacgattcta

SEQ ID NO: 404213 - DNA, 20 bp, Artificial Sequence
  Description of Artificial Sequence: Synthetic oligonucleotide
  Target: LAMA2; (+) strand; PAM type: YTN; PAM sequence: CTC
cagggtacacgattctagat

SEQ ID NO: 404214 - DNA, 20 bp, Artificial Sequence
  Description of Artificial Sequence: Synthetic oligonucleotide
  Target: LAMA2; (+) strand; PAM type: YTN; PAM sequence: TTC
tagatgtggatgcaaatgca

SEQ ID NO: 404215 - DNA, 20 bp, Artificial Sequence
  Description of Artificial Sequence: Synthetic oligonucleotide
  Target: LAMA2; (+) strand; PAM type: YTN; PAM sequence: CTA
gatgtggatgcaaatgcaat

SEQ ID NO: 404216 - DNA, 20 bp, Artificial Sequence
  Description of Artificial Sequence: Synthetic oligonucleotide
  Target: LAMA2; (+) strand; PAM type: YTN; PAM sequence: CTG
tttgttggtggcctgactgg

SEQ ID NO: 404217 - DNA, 20 bp, Artificial Sequence
  Description of Artificial Sequence: Synthetic oligonucleotide
  Target: LAMA2; (+) strand; PAM type: YTN; PAM sequence: TTT
gttggtggcctgactgggaa

SEQ ID NO: 404218 - DNA, 20 bp, Artificial Sequence
  Description of Artificial Sequence: Synthetic oligonucleotide
  Target: LAMA2; (+) strand; PAM type: YTN; PAM sequence: TTG
ttggtggcctgactgggaaa

SEQ ID NO: 404219 - DNA, 20 bp, Artificial Sequence
  Description of Artificial Sequence: Synthetic oligonucleotide
  Target: LAMA2; (+) strand; PAM type: YTN; PAM sequence: TTG
gtggcctgactgggaaatta

SEQ ID NO: 404220 - DNA, 20 bp, Artificial Sequence
  Description of Artificial Sequence: Synthetic oligonucleotide
  Target: LAMA2; (+) strand; PAM type: YTN; PAM sequence: CTG
actgggaaattaaaggtaat

SEQ ID NO: 404221 - DNA, 20 bp, Artificial Sequence
  Description of Artificial Sequence: Synthetic oligonucleotide
  Target: LAMA2; (+) strand; PAM type: YTN; PAM sequence: CTG
ggaaattaaaggtaatgtgt

SEQ ID NO: 404222 - DNA, 20 bp, Artificial Sequence
  Description of Artificial Sequence: Synthetic oligonucleotide
  Target: LAMA2; (+) strand; PAM type: YTN; PAM sequence: TTA
aaggtaatgtgttcatcctc

SEQ ID NO: 404223 - DNA, 20 bp, Artificial Sequence
  Description of Artificial Sequence: Synthetic oligonucleotide
  Target: LAMA2; (+) strand; PAM type: YTN; PAM sequence: TTC
atcctcctcctgtttatttc

SEQ ID NO: 404224 - DNA, 20 bp, Artificial Sequence
  Description of Artificial Sequence: Synthetic oligonucleotide
  Target: LAMA2; (+) strand; PAM type: YTN; PAM sequence: CTC
ctcctgtttatttcatcttt

SEQ ID NO: 404225 - DNA, 20 bp, Artificial Sequence
  Description of Artificial Sequence: Synthetic oligonucleotide
  Target: LAMA2; (+) strand; PAM type: YTN; PAM sequence: CTC
ctgtttatttcatctttgtt

SEQ ID NO: 404226 - DNA, 20 bp, Artificial Sequence
  Description of Artificial Sequence: Synthetic oligonucleotide
  Target: LAMA2; (+) strand; PAM type: YTN; PAM sequence: CTG
tttatttcatctttgttgac

SEQ ID NO: 404227 - DNA, 20 bp, Artificial Sequence
  Description of Artificial Sequence: Synthetic oligonucleotide
  Target: LAMA2; (+) strand; PAM type: YTN; PAM sequence: TTT
atttcatctttgttgacatc

SEQ ID NO: 404228 - DNA, 20 bp, Artificial Sequence
  Description of Artificial Sequence: Synthetic oligonucleotide
  Target: LAMA2; (+) strand; PAM type: YTN; PAM sequence: TTA
tttcatctttgttgacatct

SEQ ID NO: 404229 - DNA, 20 bp, Artificial Sequence
  Description of Artificial Sequence: Synthetic oligonucleotide
  Target: LAMA2; (+) strand; PAM type: YTN; PAM sequence: TTT
catctttgttgacatctcct

SEQ ID NO: 404230 - DNA, 20 bp, Artificial Sequence
  Description of Artificial Sequence: Synthetic oligonucleotide
  Target: LAMA2; (+) strand; PAM type: YTN; PAM sequence: TTC
atctttgttgacatctcctg

SEQ ID NO: 404231 - DNA, 20 bp, Artificial Sequence
  Description of Artificial Sequence: Synthetic oligonucleotide
  Target: LAMA2; (+) strand; PAM type: YTN; PAM sequence: CTT
tgttgacatctcctgacata

SEQ ID NO: 404232 - DNA, 20 bp, Artificial Sequence
  Description of Artificial Sequence: Synthetic oligonucleotide
  Target: LAMA2; (+) strand; PAM type: YTN; PAM sequence: TTT
gttgacatctcctgacataa

SEQ ID NO: 404233 - DNA, 20 bp, Artificial Sequence
  Description of Artificial Sequence: Synthetic oligonucleotide
  Target: LAMA2; (+) strand; PAM type: YTN; PAM sequence: TTG
ttgacatctcctgacataat

SEQ ID NO: 404234 - DNA, 20 bp, Artificial Sequence
  Description of Artificial Sequence: Synthetic oligonucleotide
  Target: LAMA2; (+) strand; PAM type: YTN; PAM sequence: TTG
acatctcctgacataattac

SEQ ID NO: 404235 - DNA, 20 bp, Artificial Sequence
  Description of Artificial Sequence: Synthetic oligonucleotide
  Target: LAMA2; (+) strand; PAM type: YTN; PAM sequence: CTC
ctgacataattacttcagga

SEQ ID NO: 404236 - DNA, 20 bp, Artificial Sequence
  Description of Artificial Sequence: Synthetic oligonucleotide
  Target: LAMA2; (+) strand; PAM type: YTN; PAM sequence: CTG
acataattacttcaggagaa

SEQ ID NO: 404237 - DNA, 20 bp, Artificial Sequence
  Description of Artificial Sequence: Synthetic oligonucleotide
  Target: LAMA2; (+) strand; PAM type: YTN; PAM sequence: TTA
cttcaggagaaggtatgata

SEQ ID NO: 404238 - DNA, 20 bp, Artificial Sequence
  Description of Artificial Sequence: Synthetic oligonucleotide
  Target: LAMA2; (+) strand; PAM type: YTN; PAM sequence: CTT
caggagaaggtatgataaag

SEQ ID NO: 404239 - DNA, 20 bp, Artificial Sequence
  Description of Artificial Sequence: Synthetic oligonucleotide
  Target: LAMA2; (+) strand; PAM type: YTN; PAM sequence: TTC
aggagaaggtatgataaagc

SEQ ID NO: 404240 - DNA, 20 bp, Artificial Sequence
  Description of Artificial Sequence: Synthetic oligonucleotide
  Target: LAMA2; (+) strand; PAM type: YTN; PAM sequence: CTC
tgtaaaacttgatcacgttt

SEQ ID NO: 404241 - DNA, 20 bp, Artificial Sequence
  Description of Artificial Sequence: Synthetic oligonucleotide
  Target: LAMA2; (+) strand; PAM type: YTN; PAM sequence: CTG
taaaacttgatcacgtttta

SEQ ID NO: 404242 - DNA, 20 bp, Artificial Sequence
  Description of Artificial Sequence: Synthetic oligonucleotide
  Target: LAMA2; (+) strand; PAM type: YTN; PAM sequence: CTT
gatcacgttttacttaactt

SEQ ID NO: 404243 - DNA, 20 bp, Artificial Sequence
  Description of Artificial Sequence: Synthetic oligonucleotide
  Target: LAMA2; (+) strand; PAM type: YTN; PAM sequence: TTG
atcacgttttacttaacttg

SEQ ID NO: 404244 - DNA, 20 bp, Artificial Sequence
  Description of Artificial Sequence: Synthetic oligonucleotide
  Target: LAMA2; (+) strand; PAM type: YTN; PAM sequence: TTT
tacttaacttgcatttatga

SEQ ID NO: 404245 - DNA, 20 bp, Artificial Sequence
  Description of Artificial Sequence: Synthetic oligonucleotide
  Target: LAMA2; (+) strand; PAM type: YTN; PAM sequence: TTT
acttaacttgcatttatgaa

SEQ ID NO: 404246 - DNA, 20 bp, Artificial Sequence
  Description of Artificial Sequence: Synthetic oligonucleotide
  Target: LAMA2; (+) strand; PAM type: YTN; PAM sequence: TTA
cttaacttgcatttatgaaa

SEQ ID NO: 404247 - DNA, 20 bp, Artificial Sequence
  Description of Artificial Sequence: Synthetic oligonucleotide
  Target: LAMA2; (+) strand; PAM type: YTN; PAM sequence: CTT
aacttgcatttatgaaaaca

SEQ ID NO: 404248 - DNA, 20 bp, Artificial Sequence
  Description of Artificial Sequence: Synthetic oligonucleotide
  Target: LAMA2; (+) strand; PAM type: YTN; PAM sequence: TTA
acttgcatttatgaaaacat

SEQ ID NO: 404249 - DNA, 20 bp, Artificial Sequence
  Description of Artificial Sequence: Synthetic oligonucleotide
  Target: LAMA2; (+) strand; PAM type: YTN; PAM sequence: CTT
gcatttatgaaaacatgaat

SEQ ID NO: 404250 - DNA, 20 bp, Artificial Sequence
  Description of Artificial Sequence: Synthetic oligonucleotide
  Target: LAMA2; (+) strand; PAM type: YTN; PAM sequence: TTG
catttatgaaaacatgaatt

SEQ ID NO: 404251 - DNA, 20 bp, Artificial Sequence
  Description of Artificial Sequence: Synthetic oligonucleotide
  Target: LAMA2; (+) strand; PAM type: YTN; PAM sequence: TTT
atgaaaacatgaatttactt

SEQ ID NO: 404252 - DNA, 20 bp, Artificial Sequence
  Description of Artificial Sequence: Synthetic oligonucleotide
  Target: LAMA2; (+) strand; PAM type: YTN; PAM sequence: TTA
tgaaaacatgaatttacttt

SEQ ID NO: 404253 - DNA, 20 bp, Artificial Sequence
  Description of Artificial Sequence: Synthetic oligonucleotide
  Target: LAMA2; (+) strand; PAM type: YTN; PAM sequence: TTT
actttgagtaagaattttct

SEQ ID NO: 404254 - DNA, 20 bp, Artificial Sequence
  Description of Artificial Sequence: Synthetic oligonucleotide
  Target: LAMA2; (+) strand; PAM type: YTN; PAM sequence: TTA
ctttgagtaagaattttctt

SEQ ID NO: 404255 - DNA, 20 bp, Artificial Sequence
  Description of Artificial Sequence: Synthetic oligonucleotide
  Target: LAMA2; (+) strand; PAM type: YTN; PAM sequence: CTT
tgagtaagaattttcttctt

SEQ ID NO: 404256 - DNA, 20 bp, Artificial Sequence
  Description of Artificial Sequence: Synthetic oligonucleotide
  Target: LAMA2; (+) strand; PAM type: YTN; PAM sequence: TTT
gagtaagaattttcttcttt

SEQ ID NO: 404257 - DNA, 20 bp, Artificial Sequence
  Description of Artificial Sequence: Synthetic oligonucleotide
  Target: LAMA2; (+) strand; PAM type: YTN; PAM sequence: TTG
agtaagaattttcttctttg

SEQ ID NO: 404258 - DNA, 20 bp, Artificial Sequence
  Description of Artificial Sequence: Synthetic oligonucleotide
  Target: LAMA2; (+) strand; PAM type: YTN; PAM sequence: TTT
tcttctttgacgattcaacc

SEQ ID NO: 404259 - DNA, 20 bp, Artificial Sequence
  Description of Artificial Sequence: Synthetic oligonucleotide
  Target: LAMA2; (+) strand; PAM type: YTN; PAM sequence: TTT
cttctttgacgattcaacct

SEQ ID NO: 404260 - DNA, 20 bp, Artificial Sequence
  Description of Artificial Sequence: Synthetic oligonucleotide
  Target: LAMA2; (+) strand; PAM type: YTN; PAM sequence: TTC
ttctttgacgattcaacctg

SEQ ID NO: 404261 - DNA, 20 bp, Artificial Sequence
  Description of Artificial Sequence: Synthetic oligonucleotide
  Target: LAMA2; (+) strand; PAM type: YTN; PAM sequence: CTT
ctttgacgattcaacctgga

SEQ ID NO: 404262 - DNA, 20 bp, Artificial Sequence
  Description of Artificial Sequence: Synthetic oligonucleotide
  Target: LAMA2; (+) strand; PAM type: YTN; PAM sequence: TTC
tttgacgattcaacctggaa

SEQ ID NO: 404263 - DNA, 20 bp, Artificial Sequence
  Description of Artificial Sequence: Synthetic oligonucleotide
  Target: LAMA2; (+) strand; PAM type: YTN; PAM sequence: CTT
tgacgattcaacctggaaac

SEQ ID NO: 404264 - DNA, 20 bp, Artificial Sequence
  Description of Artificial Sequence: Synthetic oligonucleotide
  Target: LAMA2; (+) strand; PAM type: YTN; PAM sequence: TTT
gacgattcaacctggaaaca

SEQ ID NO: 404265 - DNA, 20 bp, Artificial Sequence
  Description of Artificial Sequence: Synthetic oligonucleotide
  Target: LAMA2; (+) strand; PAM type: YTN; PAM sequence: TTG
acgattcaacctggaaacac

SEQ ID NO: 404266 - DNA, 20 bp, Artificial Sequence
  Description of Artificial Sequence: Synthetic oligonucleotide
  Target: LAMA2; (+) strand; PAM type: YTN; PAM sequence: TTC
aacctggaaacacaatattt

SEQ ID NO: 404267 - DNA, 20 bp, Artificial Sequence
  Description of Artificial Sequence: Synthetic oligonucleotide
  Target: LAMA2; (+) strand; PAM type: YTN; PAM sequence: CTG
gaaacacaatatttttaagc

SEQ ID NO: 404268 - DNA, 20 bp, Artificial Sequence
  Description of Artificial Sequence: Synthetic oligonucleotide
  Target: LAMA2; (+) strand; PAM type: YTN; PAM sequence: TTT
ttaagcctatgtgtatttat

SEQ ID NO: 404269 - DNA, 20 bp, Artificial Sequence
  Description of Artificial Sequence: Synthetic oligonucleotide
  Target: LAMA2; (+) strand; PAM type: YTN; PAM sequence: TTT
taagcctatgtgtatttatt

SEQ ID NO: 404270 - DNA, 20 bp, Artificial Sequence
  Description of Artificial Sequence: Synthetic oligonucleotide
  Target: LAMA2; (+) strand; PAM type: YTN; PAM sequence: TTT
aagcctatgtgtatttattt

SEQ ID NO: 404271 - DNA, 20 bp, Artificial Sequence
  Description of Artificial Sequence: Synthetic oligonucleotide
  Target: LAMA2; (+) strand; PAM type: YTN; PAM sequence: TTA
agcctatgtgtatttattta

SEQ ID NO: 404272 - DNA, 20 bp, Artificial Sequence
  Description of Artificial Sequence: Synthetic oligonucleotide
  Target: LAMA2; (+) strand; PAM type: YTN; PAM sequence: CTA
tgtgtatttatttaaacagc

SEQ ID NO: 404273 - DNA, 20 bp, Artificial Sequence
  Description of Artificial Sequence: Synthetic oligonucleotide
  Target: LAMA2; (+) strand; PAM type: YTN; PAM sequence: TTT
atttaaacagctgttgtttt

SEQ ID NO: 404274 - DNA, 20 bp, Artificial Sequence
  Description of Artificial Sequence: Synthetic oligonucleotide
  Target: LAMA2; (+) strand; PAM type: YTN; PAM sequence: TTA
tttaaacagctgttgttttg

SEQ ID NO: 404275 - DNA, 20 bp, Artificial Sequence
  Description of Artificial Sequence: Synthetic oligonucleotide
  Target: LAMA2; (+) strand; PAM type: YTN; PAM sequence: TTT
aaacagctgttgttttgtct

SEQ ID NO: 404276 - DNA, 20 bp, Artificial Sequence
  Description of Artificial Sequence: Synthetic oligonucleotide
  Target: LAMA2; (+) strand; PAM type: YTN; PAM sequence: TTA
aacagctgttgttttgtctt

SEQ ID NO: 404277 - DNA, 20 bp, Artificial Sequence
  Description of Artificial Sequence: Synthetic oligonucleotide
  Target: LAMA2; (+) strand; PAM type: YTN; PAM sequence: CTG
ttgttttgtctttatctgtg

SEQ ID NO: 404278 - DNA, 20 bp, Artificial Sequence
  Description of Artificial Sequence: Synthetic oligonucleotide
  Target: LAMA2; (+) strand; PAM type: YTN; PAM sequence: TTG
ttttgtctttatctgtggca

SEQ ID NO: 404279 - DNA, 20 bp, Artificial Sequence
  Description of Artificial Sequence: Synthetic oligonucleotide
  Target: LAMA2; (+) strand; PAM type: YTN; PAM sequence: TTT
tgtctttatctgtggcatca

SEQ ID NO: 404280 - DNA, 20 bp, Artificial Sequence
  Description of Artificial Sequence: Synthetic oligonucleotide
  Target: LAMA2; (+) strand; PAM type: YTN; PAM sequence: TTT
gtctttatctgtggcatcag

SEQ ID NO: 404281 - DNA, 20 bp, Artificial Sequence
  Description of Artificial Sequence: Synthetic oligonucleotide
  Target: LAMA2; (+) strand; PAM type: YTN; PAM sequence: TTG
tctttatctgtggcatcagt

SEQ ID NO: 404282 - DNA, 20 bp, Artificial Sequence
  Description of Artificial Sequence: Synthetic oligonucleotide
  Target: LAMA2; (+) strand; PAM type: YTN; PAM sequence: CTT
tatctgtggcatcagttttt

SEQ ID NO: 404283 - DNA, 20 bp, Artificial Sequence
  Description of Artificial Sequence: Synthetic oligonucleotide
  Target: LAMA2; (+) strand; PAM type: YTN; PAM sequence: TTT
atctgtggcatcagtttttt

SEQ ID NO: 404284 - DNA, 20 bp, Artificial Sequence
  Description of Artificial Sequence: Synthetic oligonucleotide
  Target: LAMA2; (+) strand; PAM type: YTN; PAM sequence: TTA
tctgtggcatcagttttttg

SEQ ID NO: 404285 - DNA, 20 bp, Artificial Sequence
  Description of Artificial Sequence: Synthetic oligonucleotide
  Target: LAMA2; (+) strand; PAM type: YTN; PAM sequence: CTG
tggcatcagttttttgtata

SEQ ID NO: 404286 - DNA, 20 bp, Artificial Sequence
  Description of Artificial Sequence: Synthetic oligonucleotide
  Target: LAMA2; (+) strand; PAM type: YTN; PAM sequence: TTT
tttgtatattcttgttttag

SEQ ID NO: 404287 - DNA, 20 bp, Artificial Sequence
  Description of Artificial Sequence: Synthetic oligonucleotide
  Target: LAMA2; (+) strand; PAM type: YTN; PAM sequence: TTT
ttgtatattcttgttttagt

SEQ ID NO: 404288 - DNA, 20 bp, Artificial Sequence
  Description of Artificial Sequence: Synthetic oligonucleotide
  Target: LAMA2; (+) strand; PAM type: YTN; PAM sequence: TTT
tgtatattcttgttttagtt

SEQ ID NO: 404289 - DNA, 20 bp, Artificial Sequence
  Description of Artificial Sequence: Synthetic oligonucleotide
  Target: LAMA2; (+) strand; PAM type: YTN; PAM sequence: TTT
gtatattcttgttttagttg

SEQ ID NO: 404290 - DNA, 20 bp, Artificial Sequence
  Description of Artificial Sequence: Synthetic oligonucleotide
  Target: LAMA2; (+) strand; PAM type: YTN; PAM sequence: TTG
tatattcttgttttagttgc

SEQ ID NO: 404291 - DNA, 20 bp, Artificial Sequence
  Description of Artificial Sequence: Synthetic oligonucleotide
  Target: LAMA2; (+) strand; PAM type: YTN; PAM sequence: TTC
ttgttttagttgcctcaaga

SEQ ID NO: 404292 - DNA, 20 bp, Artificial Sequence
  Description of Artificial Sequence: Synthetic oligonucleotide
  Target: LAMA2; (+) strand; PAM type: YTN; PAM sequence: CTT
gttttagttgcctcaagagc

SEQ ID NO: 404293 - DNA, 20 bp, Artificial Sequence
  Description of Artificial Sequence: Synthetic oligonucleotide
  Target: LAMA2; (+) strand; PAM type: YTN; PAM sequence: TTG
ttttagttgcctcaagagca

SEQ ID NO: 404294 - DNA, 20 bp, Artificial Sequence
  Description of Artificial Sequence: Synthetic oligonucleotide
  Target: LAMA2; (+) strand; PAM type: YTN; PAM sequence: TTT
tagttgcctcaagagcaaag

SEQ ID NO: 404295 - DNA, 20 bp, Artificial Sequence
  Description of Artificial Sequence: Synthetic oligonucleotide
  Target: LAMA2; (+) strand; PAM type: YTN; PAM sequence: TTT
agttgcctcaagagcaaagt

SEQ ID NO: 404296 - DNA, 20 bp, Artificial Sequence
  Description of Artificial Sequence: Synthetic oligonucleotide
  Target: LAMA2; (+) strand; PAM type: YTN; PAM sequence: TTA
gttgcctcaagagcaaagtg

SEQ ID NO: 404297 - DNA, 20 bp, Artificial Sequence
  Description of Artificial Sequence: Synthetic oligonucleotide
  Target: LAMA2; (+) strand; PAM type: YTN; PAM sequence: TTG
cctcaagagcaaagtgtttt

SEQ ID NO: 404298 - DNA, 20 bp, Artificial Sequence
  Description of Artificial Sequence: Synthetic oligonucleotide
  Target: LAMA2; (+) strand; PAM type: YTN; PAM sequence: CTC
aagagcaaagtgttttttaa

SEQ ID NO: 404299 - DNA, 20 bp, Artificial Sequence
  Description of Artificial Sequence: Synthetic oligonucleotide
  Target: LAMA2; (+) strand; PAM type: YTN; PAM sequence: TTT
tttaagtatacctcatcttc

SEQ ID NO: 404300 - DNA, 20 bp, Artificial Sequence
  Description of Artificial Sequence: Synthetic oligonucleotide
  Target: LAMA2; (+) strand; PAM type: YTN; PAM sequence: TTT
ttaagtatacctcatcttct

SEQ ID NO: 404301 - DNA, 20 bp, Artificial Sequence
  Description of Artificial Sequence: Synthetic oligonucleotide
  Target: LAMA2; (+) strand; PAM type: YTN; PAM sequence: TTT
taagtatacctcatcttctg

SEQ ID NO: 404302 - DNA, 20 bp, Artificial Sequence
  Description of Artificial Sequence: Synthetic oligonucleotide
  Target: LAMA2; (+) strand; PAM type: YTN; PAM sequence: TTT
aagtatacctcatcttctga

SEQ ID NO: 404303 - DNA, 20 bp, Artificial Sequence
  Description of Artificial Sequence: Synthetic oligonucleotide
  Target: LAMA2; (+) strand; PAM type: YTN; PAM sequence: TTA
agtatacctcatcttctgaa

SEQ ID NO: 404304 - DNA, 20 bp, Artificial Sequence
  Description of Artificial Sequence: Synthetic oligonucleotide
  Target: LAMA2; (+) strand; PAM type: YTN; PAM sequence: CTC
atcttctgaatcgatttatg

SEQ ID NO: 404305 - DNA, 20 bp, Artificial Sequence
  Description of Artificial Sequence: Synthetic oligonucleotide
  Target: LAMA2; (+) strand; PAM type: YTN; PAM sequence: CTT
ctgaatcgatttatgattta

SEQ ID NO: 404306 - DNA, 20 bp, Artificial Sequence
  Description of Artificial Sequence: Synthetic oligonucleotide
  Target: LAMA2; (+) strand; PAM type: YTN; PAM sequence: TTC
tgaatcgatttatgatttat

SEQ ID NO: 404307 - DNA, 20 bp, Artificial Sequence
  Description of Artificial Sequence: Synthetic oligonucleotide
  Target: LAMA2; (+) strand; PAM type: YTN; PAM sequence: CTG
aatcgatttatgatttatag

SEQ ID NO: 404308 - DNA, 20 bp, Artificial Sequence
  Description of Artificial Sequence: Synthetic oligonucleotide
  Target: LAMA2; (+) strand; PAM type: YTN; PAM sequence: TTT
atgatttatagatatgaagt

SEQ ID NO: 404309 - DNA, 20 bp, Artificial Sequence
  Description of Artificial Sequence: Synthetic oligonucleotide
  Target: LAMA2; (+) strand; PAM type: YTN; PAM sequence: TTA
tgatttatagatatgaagtg

SEQ ID NO: 404310 - DNA, 20 bp, Artificial Sequence
  Description of Artificial Sequence: Synthetic oligonucleotide
  Target: LAMA2; (+) strand; PAM type: YTN; PAM sequence: TTT
atagatatgaagtgctataa

SEQ ID NO: 404311 - DNA, 20 bp, Artificial Sequence
  Description of Artificial Sequence: Synthetic oligonucleotide
  Target: LAMA2; (+) strand; PAM type: YTN; PAM sequence: TTA
tagatatgaagtgctataaa

SEQ ID NO: 404312 - DNA, 20 bp, Artificial Sequence
  Description of Artificial Sequence: Synthetic oligonucleotide
  Target: LAMA2; (+) strand; PAM type: YTN; PAM sequence: CTA
taaagttcatactcacatct

SEQ ID NO: 404313 - DNA, 20 bp, Artificial Sequence
  Description of Artificial Sequence: Synthetic oligonucleotide
  Target: LAMA2; (+) strand; PAM type: YTN; PAM sequence: TTC
atactcacatctaattaaaa

SEQ ID NO: 404314 - DNA, 20 bp, Artificial Sequence
  Description of Artificial Sequence: Synthetic oligonucleotide
  Target: LAMA2; (+) strand; PAM type: YTN; PAM sequence: CTC
acatctaattaaaagattta

SEQ ID NO: 404315 - DNA, 20 bp, Artificial Sequence
  Description of Artificial Sequence: Synthetic oligonucleotide
  Target: LAMA2; (+) strand; PAM type: YTN; PAM sequence: CTA
attaaaagatttatgaatac

SEQ ID NO: 404316 - DNA, 20 bp, Artificial Sequence
  Description of Artificial Sequence: Synthetic oligonucleotide
  Target: LAMA2; (+) strand; PAM type: YTN; PAM sequence: TTA
aaagatttatgaatactttg

SEQ ID NO: 404317 - DNA, 20 bp, Artificial Sequence
  Description of Artificial Sequence: Synthetic oligonucleotide
  Target: LAMA2; (+) strand; PAM type: YTN; PAM sequence: TTT
atgaatactttgggaaatat

SEQ ID NO: 404318 - DNA, 20 bp, Artificial Sequence
  Description of Artificial Sequence: Synthetic oligonucleotide
  Target: LAMA2; (+) strand; PAM type: YTN; PAM sequence: TTA
tgaatactttgggaaatatc

SEQ ID NO: 404319 - DNA, 20 bp, Artificial Sequence
  Description of Artificial Sequence: Synthetic oligonucleotide
  Target: LAMA2; (+) strand; PAM type: YTN; PAM sequence: CTT
tgggaaatatcacaggagct

SEQ ID NO: 404320 - DNA, 20 bp, Artificial Sequence
  Description of Artificial Sequence: Synthetic oligonucleotide
  Target: LAMA2; (+) strand; PAM type: YTN; PAM sequence: TTT
gggaaatatcacaggagcta

SEQ ID NO: 404321 - DNA, 20 bp, Artificial Sequence
  Description of Artificial Sequence: Synthetic oligonucleotide
  Target: LAMA2; (+) strand; PAM type: YTN; PAM sequence: TTG
ggaaatatcacaggagctat

SEQ ID NO: 404322 - DNA, 20 bp, Artificial Sequence
  Description of Artificial Sequence: Synthetic oligonucleotide
  Target: LAMA2; (+) strand; PAM type: YTN; PAM sequence: CTA
taagctttcaaaacatgatc

SEQ ID NO: 404323 - DNA, 20 bp, Artificial Sequence
  Description of Artificial Sequence: Synthetic oligonucleotide
  Target: LAMA2; (+) strand; PAM type: YTN; PAM sequence: CTT
tcaaaacatgatctggtttt

SEQ ID NO: 404324 - DNA, 20 bp, Artificial Sequence
  Description of Artificial Sequence: Synthetic oligonucleotide
  Target: LAMA2; (+) strand; PAM type: YTN; PAM sequence: TTT
caaaacatgatctggttttt

SEQ ID NO: 404325 - DNA, 20 bp, Artificial Sequence
  Description of Artificial Sequence: Synthetic oligonucleotide
  Target: LAMA2; (+) strand; PAM type: YTN; PAM sequence: TTC
aaaacatgatctggttttta

SEQ ID NO: 404326 - DNA, 20 bp, Artificial Sequence
  Description of Artificial Sequence: Synthetic oligonucleotide
  Target: LAMA2; (+) strand; PAM type: YTN; PAM sequence: CTG
gtttttaaagttctcaagtt

SEQ ID NO: 404327 - DNA, 20 bp, Artificial Sequence
  Description of Artificial Sequence: Synthetic oligonucleotide
  Target: LAMA2; (+) strand; PAM type: YTN; PAM sequence: TTT
ttaaagttctcaagttgctc

SEQ ID NO: 404328 - DNA, 20 bp, Artificial Sequence
  Description of Artificial Sequence: Synthetic oligonucleotide
  Target: LAMA2; (+) strand; PAM type: YTN; PAM sequence: TTT
taaagttctcaagttgctct

SEQ ID NO: 404329 - DNA, 20 bp, Artificial Sequence
  Description of Artificial Sequence: Synthetic oligonucleotide
  Target: LAMA2; (+) strand; PAM type: YTN; PAM sequence: TTT
aaagttctcaagttgctctt

SEQ ID NO: 404330 - DNA, 20 bp, Artificial Sequence
  Description of Artificial Sequence: Synthetic oligonucleotide
  Target: LAMA2; (+) strand; PAM type: YTN; PAM sequence: TTA
aagttctcaagttgctctta

SEQ ID NO: 404331 - DNA, 20 bp, Artificial Sequence
  Description of Artificial Sequence: Synthetic oligonucleotide
  Target: LAMA2; (+) strand; PAM type: YTN; PAM sequence: TTC
tcaagttgctcttattctta

SEQ ID NO: 404332 - DNA, 20 bp, Artificial Sequence
  Description of Artificial Sequence: Synthetic oligonucleotide
  Target: LAMA2; (+) strand; PAM type: YTN; PAM sequence: CTC
aagttgctcttattcttata

SEQ ID NO: 404333 - DNA, 20 bp, Artificial Sequence
  Description of Artificial Sequence: Synthetic oligonucleotide
  Target: LAMA2; (+) strand; PAM type: YTN; PAM sequence: TTG
ctcttattcttataggatga

SEQ ID NO: 404334 - DNA, 20 bp, Artificial Sequence
  Description of Artificial Sequence: Synthetic oligonucleotide
  Target: LAMA2; (+) strand; PAM type: YTN; PAM sequence: CTC
ttattcttataggatgatgc

SEQ ID NO: 404335 - DNA, 20 bp, Artificial Sequence
  Description of Artificial Sequence: Synthetic oligonucleotide
  Target: LAMA2; (+) strand; PAM type: YTN; PAM sequence: CTT
attcttataggatgatgcac

SEQ ID NO: 404336 - DNA, 20 bp, Artificial Sequence
  Description of Artificial Sequence: Synthetic oligonucleotide
  Target: LAMA2; (+) strand; PAM type: YTN; PAM sequence: TTA
ttcttataggatgatgcact

SEQ ID NO: 404337 - DNA, 20 bp, Artificial Sequence
  Description of Artificial Sequence: Synthetic oligonucleotide
  Target: LAMA2; (+) strand; PAM type: YTN; PAM sequence: TTC
ttataggatgatgcacttaa

SEQ ID NO: 404338 - DNA, 20 bp, Artificial Sequence
  Description of Artificial Sequence: Synthetic oligonucleotide
  Target: LAMA2; (+) strand; PAM type: YTN; PAM sequence: CTT
ataggatgatgcacttaata

SEQ ID NO: 404339 - DNA, 20 bp, Artificial Sequence
  Description of Artificial Sequence: Synthetic oligonucleotide
  Target: LAMA2; (+) strand; PAM type: YTN; PAM sequence: TTA
taggatgatgcacttaatat

SEQ ID NO: 404340 - DNA, 20 bp, Artificial Sequence
  Description of Artificial Sequence: Synthetic oligonucleotide
  Target: LAMA2; (+) strand; PAM type: YTN; PAM sequence: CTT
aatattcataattgcttcat

SEQ ID NO: 404341 - DNA, 20 bp, Artificial Sequence
  Description of Artificial Sequence: Synthetic oligonucleotide
  Target: LAMA2; (+) strand; PAM type: YTN; PAM sequence: TTA
atattcataattgcttcatg

SEQ ID NO: 404342 - DNA, 20 bp, Artificial Sequence
  Description of Artificial Sequence: Synthetic oligonucleotide
  Target: LAMA2; (+) strand; PAM type: YTN; PAM sequence: TTC
ataattgcttcatgacagtc

SEQ ID NO: 404343 - DNA, 20 bp, Artificial Sequence
  Description of Artificial Sequence: Synthetic oligonucleotide
  Target: LAMA2; (+) strand; PAM type: YTN; PAM sequence: TTG
cttcatgacagtccttgcgc

SEQ ID NO: 404344 - DNA, 20 bp, Artificial Sequence
  Description of Artificial Sequence: Synthetic oligonucleotide
  Target: LAMA2; (+) strand; PAM type: YTN; PAM sequence: CTT
catgacagtccttgcgcatt

SEQ ID NO: 404345 - DNA, 20 bp, Artificial Sequence
  Description of Artificial Sequence: Synthetic oligonucleotide
  Target: LAMA2; (+) strand; PAM type: YTN; PAM sequence: TTC
atgacagtccttgcgcattt

SEQ ID NO: 404346 - DNA, 20 bp, Artificial Sequence
  Description of Artificial Sequence: Synthetic oligonucleotide
  Target: LAMA2; (+) strand; PAM type: YTN; PAM sequence: CTT
gcgcatttcaaattgcagaa

SEQ ID NO: 404347 - DNA, 20 bp, Artificial Sequence
  Description of Artificial Sequence: Synthetic oligonucleotide
  Target: LAMA2; (+) strand; PAM type: YTN; PAM sequence: TTG
cgcatttcaaattgcagaat

SEQ ID NO: 404348 - DNA, 20 bp, Artificial Sequence
  Description of Artificial Sequence: Synthetic oligonucleotide
  Target: LAMA2; (+) strand; PAM type: YTN; PAM sequence: TTT
caaattgcagaatgcctgcc

SEQ ID NO: 404349 - DNA, 20 bp, Artificial Sequence
  Description of Artificial Sequence: Synthetic oligonucleotide
  Target: LAMA2; (+) strand; PAM type: YTN; PAM sequence: TTC
aaattgcagaatgcctgcct

SEQ ID NO: 404350 - DNA, 20 bp, Artificial Sequence
  Description of Artificial Sequence: Synthetic oligonucleotide
  Target: LAMA2; (+) strand; PAM type: YTN; PAM sequence: TTG
cagaatgcctgccttttaaa

SEQ ID NO: 404351 - DNA, 20 bp, Artificial Sequence
  Description of Artificial Sequence: Synthetic oligonucleotide
  Target: LAMA2; (+) strand; PAM type: YTN; PAM sequence: CTG
ccttttaaagaagcttgtgt

SEQ ID NO: 404352 - DNA, 20 bp, Artificial Sequence
  Description of Artificial Sequence: Synthetic oligonucleotide
  Target: LAMA2; (+) strand; PAM type: YTN; PAM sequence: CTT
ttaaagaagcttgtgttgat

SEQ ID NO: 404353 - DNA, 20 bp, Artificial Sequence
  Description of Artificial Sequence: Synthetic oligonucleotide
  Target: LAMA2; (+) strand; PAM type: YTN; PAM sequence: TTT
taaagaagcttgtgttgatt

SEQ ID NO: 404354 - DNA, 20 bp, Artificial Sequence
  Description of Artificial Sequence: Synthetic oligonucleotide
  Target: LAMA2; (+) strand; PAM type: YTN; PAM sequence: TTT
aaagaagcttgtgttgatta

SEQ ID NO: 404355 - DNA, 20 bp, Artificial Sequence
  Description of Artificial Sequence: Synthetic oligonucleotide
  Target: LAMA2; (+) strand; PAM type: YTN; PAM sequence: TTA
aagaagcttgtgttgattaa

SEQ ID NO: 404356 - DNA, 20 bp, Artificial Sequence
  Description of Artificial Sequence: Synthetic oligonucleotide
  Target: LAMA2; (+) strand; PAM type: YTN; PAM sequence: CTT
gtgttgattaaatggaatta

SEQ ID NO: 404357 - DNA, 20 bp, Artificial Sequence
  Description of Artificial Sequence: Synthetic oligonucleotide
  Target: LAMA2; (+) strand; PAM type: YTN; PAM sequence: TTG
tgttgattaaatggaattag

SEQ ID NO: 404358 - DNA, 20 bp, Artificial Sequence
  Description of Artificial Sequence: Synthetic oligonucleotide
  Target: LAMA2; (+) strand; PAM type: YTN; PAM sequence: TTG
attaaatggaattaggtgtt

SEQ ID NO: 404359 - DNA, 20 bp, Artificial Sequence
  Description of Artificial Sequence: Synthetic oligonucleotide
  Target: LAMA2; (+) strand; PAM type: YTN; PAM sequence: TTA
aatggaattaggtgttggga

SEQ ID NO: 404360 - DNA, 20 bp, Artificial Sequence
  Description of Artificial Sequence: Synthetic oligonucleotide
  Target: LAMA2; (+) strand; PAM type: YTN; PAM sequence: TTA
ggtgttgggaaaccactatg

SEQ ID NO: 404361 - DNA, 20 bp, Artificial Sequence
  Description of Artificial Sequence: Synthetic oligonucleotide
  Target: LAMA2; (+) strand; PAM type: YTN; PAM sequence: TTG
ggaaaccactatgggtgaga

SEQ ID NO: 404362 - DNA, 20 bp, Artificial Sequence
  Description of Artificial Sequence: Synthetic oligonucleotide
  Target: LAMA2; (+) strand; PAM type: YTN; PAM sequence: CTA
tgggtgagatgcaggagcac

SEQ ID NO: 404363 - DNA, 20 bp, Artificial Sequence
  Description of Artificial Sequence: Synthetic oligonucleotide
  Target: LAMA2; (+) strand; PAM type: YTN; PAM sequence: CTG
ggcttgtcagaatcatcctg

SEQ ID NO: 404364 - DNA, 20 bp, Artificial Sequence
  Description of Artificial Sequence: Synthetic oligonucleotide
  Target: LAMA2; (+) strand; PAM type: YTN; PAM sequence: CTT
gtcagaatcatcctgagttg

SEQ ID NO: 404365 - DNA, 20 bp, Artificial Sequence
  Description of Artificial Sequence: Synthetic oligonucleotide
  Target: LAMA2; (+) strand; PAM type: YTN; PAM sequence: TTG
tcagaatcatcctgagttga

SEQ ID NO: 404366 - DNA, 20 bp, Artificial Sequence
  Description of Artificial Sequence: Synthetic oligonucleotide
  Target: LAMA2; (+) strand; PAM type: YTN; PAM sequence: CTG
agttgagattagtcagaaaa

SEQ ID NO: 404367 - DNA, 20 bp, Artificial Sequence
  Description of Artificial Sequence: Synthetic oligonucleotide
  Target: LAMA2; (+) strand; PAM type: YTN; PAM sequence: TTG
agattagtcagaaaatgtga

SEQ ID NO: 404368 - DNA, 20 bp, Artificial Sequence
  Description of Artificial Sequence: Synthetic oligonucleotide
  Target: LAMA2; (+) strand; PAM type: YTN; PAM sequence: TTA
gtcagaaaatgtgaaaagcc

SEQ ID NO: 404369 - DNA, 20 bp, Artificial Sequence
  Description of Artificial Sequence: Synthetic oligonucleotide
  Target: LAMA2; (+) strand; PAM type: YTN; PAM sequence: TTT
atgaggactcaaccttcata

SEQ ID NO: 404370 - DNA, 20 bp, Artificial Sequence
  Description of Artificial Sequence: Synthetic oligonucleotide
  Target: LAMA2; (+) strand; PAM type: YTN; PAM sequence: TTA
tgaggactcaaccttcatat

SEQ ID NO: 404371 - DNA, 20 bp, Artificial Sequence
  Description of Artificial Sequence: Synthetic oligonucleotide
  Target: LAMA2; (+) strand; PAM type: YTN; PAM sequence: CTC
aaccttcatatagaatgagg

SEQ ID NO: 404372 - DNA, 20 bp, Artificial Sequence
  Description of Artificial Sequence: Synthetic oligonucleotide
  Target: LAMA2; (+) strand; PAM type: YTN; PAM sequence: CTT
catatagaatgaggttattt

SEQ ID NO: 404373 - DNA, 20 bp, Artificial Sequence
  Description of Artificial Sequence: Synthetic oligonucleotide
  Target: LAMA2; (+) strand; PAM type: YTN; PAM sequence: TTC
atatagaatgaggttatttt

SEQ ID NO: 404374 - DNA, 20 bp, Artificial Sequence
  Description of Artificial Sequence: Synthetic oligonucleotide
  Target: LAMA2; (+) strand; PAM type: YTN; PAM sequence: TTA
ttttatttactttgagtacg

SEQ ID NO: 404375 - DNA, 20 bp, Artificial Sequence
  Description of Artificial Sequence: Synthetic oligonucleotide
  Target: LAMA2; (+) strand; PAM type: YTN; PAM sequence: TTT
tatttactttgagtacgaga

SEQ ID NO: 404376 - DNA, 20 bp, Artificial Sequence
  Description of Artificial Sequence: Synthetic oligonucleotide
  Target: LAMA2; (+) strand; PAM type: YTN; PAM sequence: TTT
atttactttgagtacgagat

SEQ ID NO: 404377 - DNA, 20 bp, Artificial Sequence
  Description of Artificial Sequence: Synthetic oligonucleotide
  Target: LAMA2; (+) strand; PAM type: YTN; PAM sequence: TTA
tttactttgagtacgagatg

SEQ ID NO: 404378 - DNA, 20 bp, Artificial Sequence
  Description of Artificial Sequence: Synthetic oligonucleotide
  Target: LAMA2; (+) strand; PAM type: YTN; PAM sequence: TTT
actttgagtacgagatgtga

SEQ ID NO: 404379 - DNA, 20 bp, Artificial Sequence
  Description of Artificial Sequence: Synthetic oligonucleotide
  Target: LAMA2; (+) strand; PAM type: YTN; PAM sequence: TTA
ctttgagtacgagatgtgac

SEQ ID NO: 404380 - DNA, 20 bp, Artificial Sequence
  Description of Artificial Sequence: Synthetic oligonucleotide
  Target: LAMA2; (+) strand; PAM type: YTN; PAM sequence: CTT
tgagtacgagatgtgactct

SEQ ID NO: 404381 - DNA, 20 bp, Artificial Sequence
  Description of Artificial Sequence: Synthetic oligonucleotide
  Target: LAMA2; (+) strand; PAM type: YTN; PAM sequence: TTT
gagtacgagatgtgactcta

SEQ ID NO: 404382 - DNA, 20 bp, Artificial Sequence
  Description of Artificial Sequence: Synthetic oligonucleotide
  Target: LAMA2; (+) strand; PAM type: YTN; PAM sequence: TTG
agtacgagatgtgactctaa

SEQ ID NO: 404383 - DNA, 20 bp, Artificial Sequence
  Description of Artificial Sequence: Synthetic oligonucleotide
  Target: LAMA2; (+) strand; PAM type: YTN; PAM sequence: CTC
taaagtatgagaatttattc

SEQ ID NO: 404384 - DNA, 20 bp, Artificial Sequence
  Description of Artificial Sequence: Synthetic oligonucleotide
  Target: LAMA2; (+) strand; PAM type: YTN; PAM sequence: CTA
aagtatgagaatttattcca

SEQ ID NO: 404385 - DNA, 20 bp, Artificial Sequence
  Description of Artificial Sequence: Synthetic oligonucleotide
  Target: LAMA2; (+) strand; PAM type: YTN; PAM sequence: TTT
attccaaaaccacacgctga

SEQ ID NO: 404386 - DNA, 20 bp, Artificial Sequence
  Description of Artificial Sequence: Synthetic oligonucleotide
  Target: LAMA2; (+) strand; PAM type: YTN; PAM sequence: TTA
ttccaaaaccacacgctgaa

SEQ ID NO: 404387 - DNA, 20 bp, Artificial Sequence
  Description of Artificial Sequence: Synthetic oligonucleotide
  Target: LAMA2; (+) strand; PAM type: YTN; PAM sequence: TTC
caaaaccacacgctgaagtt

SEQ ID NO: 404388 - DNA, 20 bp, Artificial Sequence
  Description of Artificial Sequence: Synthetic oligonucleotide
  Target: LAMA2; (+) strand; PAM type: YTN; PAM sequence: CTG
aagttatcctcgtttcttag

SEQ ID NO: 404389 - DNA, 20 bp, Artificial Sequence
  Description of Artificial Sequence: Synthetic oligonucleotide
  Target: LAMA2; (+) strand; PAM type: YTN; PAM sequence: TTA
tcctcgtttcttagaacttc

SEQ ID NO: 404390 - DNA, 20 bp, Artificial Sequence
  Description of Artificial Sequence: Synthetic oligonucleotide
  Target: LAMA2; (+) strand; PAM type: YTN; PAM sequence: CTC
gtttcttagaacttcatata

SEQ ID NO: 404391 - DNA, 20 bp, Artificial Sequence
  Description of Artificial Sequence: Synthetic oligonucleotide
  Target: LAMA2; (+) strand; PAM type: YTN; PAM sequence: TTT
cttagaacttcatataaatg

SEQ ID NO: 404392 - DNA, 20 bp, Artificial Sequence
  Description of Artificial Sequence: Synthetic oligonucleotide
  Target: LAMA2; (+) strand; PAM type: YTN; PAM sequence: TTC
ttagaacttcatataaatgt

SEQ ID NO: 404393 - DNA, 20 bp, Artificial Sequence
  Description of Artificial Sequence: Synthetic oligonucleotide
  Target: LAMA2; (+) strand; PAM type: YTN; PAM sequence: CTT
agaacttcatataaatgtat

SEQ ID NO: 404394 - DNA, 20 bp, Artificial Sequence
  Description of Artificial Sequence: Synthetic oligonucleotide
  Target: LAMA2; (+) strand; PAM type: YTN; PAM sequence: TTA
gaacttcatataaatgtata

SEQ ID NO: 404395 - DNA, 20 bp, Artificial Sequence
  Description of Artificial Sequence: Synthetic oligonucleotide
  Target: LAMA2; (+) strand; PAM type: YTN; PAM sequence: CTT
catataaatgtatatggtac

SEQ ID NO: 404396 - DNA, 20 bp, Artificial Sequence
  Description of Artificial Sequence: Synthetic oligonucleotide
  Target: LAMA2; (+) strand; PAM type: YTN; PAM sequence: TTC
atataaatgtatatggtaca

SEQ ID NO: 404397 - DNA, 20 bp, Artificial Sequence
  Description of Artificial Sequence: Synthetic oligonucleotide
  Target: LAMA2; (+) strand; PAM type: YTN; PAM sequence: TTA
tcaactttctctccttcaca

SEQ ID NO: 404398 - DNA, 20 bp, Artificial Sequence
  Description of Artificial Sequence: Synthetic oligonucleotide
  Target: LAMA2; (+) strand; PAM type: YTN; PAM sequence: CTT
tctctccttcacagatagat

SEQ ID NO: 404399 - DNA, 20 bp, Artificial Sequence
  Description of Artificial Sequence: Synthetic oligonucleotide
  Target: LAMA2; (+) strand; PAM type: YTN; PAM sequence: TTT
ctctccttcacagatagata

SEQ ID NO: 404400 - DNA, 20 bp, Artificial Sequence
  Description of Artificial Sequence: Synthetic oligonucleotide
  Target: LAMA2; (+) strand; PAM type: YTN; PAM sequence: TTC
tctccttcacagatagataa

SEQ ID NO: 404401 - DNA, 20 bp, Artificial Sequence
  Description of Artificial Sequence: Synthetic oligonucleotide
  Target: LAMA2; (+) strand; PAM type: YTN; PAM sequence: CTC
tccttcacagatagataaat

SEQ ID NO: 404402 - DNA, 20 bp, Artificial Sequence
  Description of Artificial Sequence: Synthetic oligonucleotide
  Target: LAMA2; (+) strand; PAM type: YTN; PAM sequence: CTC
cttcacagatagataaatat

SEQ ID NO: 404403 - DNA, 20 bp, Artificial Sequence
  Description of Artificial Sequence: Synthetic oligonucleotide
  Target: LAMA2; (+) strand; PAM type: YTN; PAM sequence: CTT
cacagatagataaatatagg

SEQ ID NO: 404404 - DNA, 20 bp, Artificial Sequence
  Description of Artificial Sequence: Synthetic oligonucleotide
  Target: LAMA2; (+) strand; PAM type: YTN; PAM sequence: TTC
acagatagataaatataggg

SEQ ID NO: 404405 - DNA, 20 bp, Artificial Sequence
  Description of Artificial Sequence: Synthetic oligonucleotide
  Target: LAMA2; (+) strand; PAM type: YTN; PAM sequence: TTT
tgaaatcaaatccaggttgg

SEQ ID NO: 404406 - DNA, 20 bp, Artificial Sequence
  Description of Artificial Sequence: Synthetic oligonucleotide
  Target: LAMA2; (+) strand; PAM type: YTN; PAM sequence: TTT
gaaatcaaatccaggttgga

SEQ ID NO: 404407 - DNA, 20 bp, Artificial Sequence
  Description of Artificial Sequence: Synthetic oligonucleotide
  Target: LAMA2; (+) strand; PAM type: YTN; PAM sequence: TTG
aaatcaaatccaggttggat

SEQ ID NO: 404408 - DNA, 20 bp, Artificial Sequence
  Description of Artificial Sequence: Synthetic oligonucleotide
  Target: LAMA2; (+) strand; PAM type: YTN; PAM sequence: TTG
gatttcctcctcttccactt

SEQ ID NO: 404409 - DNA, 20 bp, Artificial Sequence
  Description of Artificial Sequence: Synthetic oligonucleotide
  Target: LAMA2; (+) strand; PAM type: YTN; PAM sequence: TTT
cctcctcttccacttgctaa

SEQ ID NO: 404410 - DNA, 20 bp, Artificial Sequence
  Description of Artificial Sequence: Synthetic oligonucleotide
  Target: LAMA2; (+) strand; PAM type: YTN; PAM sequence: TTC
ctcctcttccacttgctaaa

SEQ ID NO: 404411 - DNA, 20 bp, Artificial Sequence
  Description of Artificial Sequence: Synthetic oligonucleotide
  Target: LAMA2; (+) strand; PAM type: YTN; PAM sequence: CTC
ctcttccacttgctaaaata

SEQ ID NO: 404412 - DNA, 20 bp, Artificial Sequence
  Description of Artificial Sequence: Synthetic oligonucleotide
  Target: LAMA2; (+) strand; PAM type: YTN; PAM sequence: CTC
ttccacttgctaaaatataa

SEQ ID NO: 404413 - DNA, 20 bp, Artificial Sequence
  Description of Artificial Sequence: Synthetic oligonucleotide
  Target: LAMA2; (+) strand; PAM type: YTN; PAM sequence: CTT
ccacttgctaaaatataacc

SEQ ID NO: 404414 - DNA, 20 bp, Artificial Sequence
  Description of Artificial Sequence: Synthetic oligonucleotide
  Target: LAMA2; (+) strand; PAM type: YTN; PAM sequence: TTC
cacttgctaaaatataacct

SEQ ID NO: 404415 - DNA, 20 bp, Artificial Sequence
  Description of Artificial Sequence: Synthetic oligonucleotide
  Target: LAMA2; (+) strand; PAM type: YTN; PAM sequence: CTT
gctaaaatataaccttagac

SEQ ID NO: 404416 - DNA, 20 bp, Artificial Sequence
  Description of Artificial Sequence: Synthetic oligonucleotide
  Target: LAMA2; (+) strand; PAM type: YTN; PAM sequence: TTG
ctaaaatataaccttagaca

SEQ ID NO: 404417 - DNA, 20 bp, Artificial Sequence
  Description of Artificial Sequence: Synthetic oligonucleotide
  Target: LAMA2; (+) strand; PAM type: YTN; PAM sequence: CTA
aaatataaccttagacaagt

SEQ ID NO: 404418 - DNA, 20 bp, Artificial Sequence
  Description of Artificial Sequence: Synthetic oligonucleotide
  Target: LAMA2; (+) strand; PAM type: YTN; PAM sequence: CTT
agacaagtcacttaacccct

SEQ ID NO: 404419 - DNA, 20 bp, Artificial Sequence
  Description of Artificial Sequence: Synthetic oligonucleotide
  Target: LAMA2; (+) strand; PAM type: YTN; PAM sequence: TTA
gacaagtcacttaacccctt

SEQ ID NO: 404420 - DNA, 20 bp, Artificial Sequence
  Description of Artificial Sequence: Synthetic oligonucleotide
  Target: LAMA2; (+) strand; PAM type: YTN; PAM sequence: CTT
aaccccttgggctttggtta

SEQ ID NO: 404421 - DNA, 20 bp, Artificial Sequence
  Description of Artificial Sequence: Synthetic oligonucleotide
  Target: LAMA2; (+) strand; PAM type: YTN; PAM sequence: TTA
accccttgggctttggttat

SEQ ID NO: 404422 - DNA, 20 bp, Artificial Sequence
  Description of Artificial Sequence: Synthetic oligonucleotide
  Target: LAMA2; (+) strand; PAM type: YTN; PAM sequence: CTT
gggctttggttatctcaact

SEQ ID NO: 404423 - DNA, 20 bp, Artificial Sequence
  Description of Artificial Sequence: Synthetic oligonucleotide
  Target: LAMA2; (+) strand; PAM type: YTN; PAM sequence: TTG
ggctttggttatctcaacta

SEQ ID NO: 404424 - DNA, 20 bp, Artificial Sequence
  Description of Artificial Sequence: Synthetic oligonucleotide
  Target: LAMA2; (+) strand; PAM type: YTN; PAM sequence: CTT
tggttatctcaactagaaaa

SEQ ID NO: 404425 - DNA, 20 bp, Artificial Sequence
  Description of Artificial Sequence: Synthetic oligonucleotide
  Target: LAMA2; (+) strand; PAM type: YTN; PAM sequence: TTT
ggttatctcaactagaaaag

SEQ ID NO: 404426 - DNA, 20 bp, Artificial Sequence
  Description of Artificial Sequence: Synthetic oligonucleotide
  Target: LAMA2; (+) strand; PAM type: YTN; PAM sequence: TTG
gttatctcaactagaaaaga

SEQ ID NO: 404427 - DNA, 20 bp, Artificial Sequence
  Description of Artificial Sequence: Synthetic oligonucleotide
  Target: LAMA2; (+) strand; PAM type: YTN; PAM sequence: TTA
tctcaactagaaaagaatga

SEQ ID NO: 404428 - DNA, 20 bp, Artificial Sequence
  Description of Artificial Sequence: Synthetic oligonucleotide
  Target: LAMA2; (+) strand; PAM type: YTN; PAM sequence: CTC
aactagaaaagaatgataaa

SEQ ID NO: 404429 - DNA, 20 bp, Artificial Sequence
  Description of Artificial Sequence: Synthetic oligonucleotide
  Target: LAMA2; (+) strand; PAM type: YTN; PAM sequence: CTA
gaaaagaatgataaaaatat

SEQ ID NO: 404430 - DNA, 20 bp, Artificial Sequence
  Description of Artificial Sequence: Synthetic oligonucleotide
  Target: LAMA2; (+) strand; PAM type: YTN; PAM sequence: CTA
ccttgcttgcatattgtagg

SEQ ID NO: 404431 - DNA, 20 bp, Artificial Sequence
  Description of Artificial Sequence: Synthetic oligonucleotide
  Target: LAMA2; (+) strand; PAM type: YTN; PAM sequence: CTT
gcttgcatattgtaggatac

SEQ ID NO: 404432 - DNA, 20 bp, Artificial Sequence
  Description of Artificial Sequence: Synthetic oligonucleotide
  Target: LAMA2; (+) strand; PAM type: YTN; PAM sequence: TTG
cttgcatattgtaggataca

SEQ ID NO: 404433 - DNA, 20 bp, Artificial Sequence
  Description of Artificial Sequence: Synthetic oligonucleotide
  Target: LAMA2; (+) strand; PAM type: YTN; PAM sequence: CTT
gcatattgtaggatacaata

SEQ ID NO: 404434 - DNA, 20 bp, Artificial Sequence
  Description of Artificial Sequence: Synthetic oligonucleotide
  Target: LAMA2; (+) strand; PAM type: YTN; PAM sequence: TTG
catattgtaggatacaataa

SEQ ID NO: 404435 - DNA, 20 bp, Artificial Sequence
  Description of Artificial Sequence: Synthetic oligonucleotide
  Target: LAMA2; (+) strand; PAM type: YTN; PAM sequence: TTG
taggatacaataatacattt

SEQ ID NO: 404436 - DNA, 20 bp, Artificial Sequence
  Description of Artificial Sequence: Synthetic oligonucleotide
  Target: LAMA2; (+) strand; PAM type: YTN; PAM sequence: TTT
tttaatattcttataactct

SEQ ID NO: 404437 - DNA, 20 bp, Artificial Sequence
  Description of Artificial Sequence: Synthetic oligonucleotide
  Target: LAMA2; (+) strand; PAM type: YTN; PAM sequence: TTT
ttaatattcttataactctt

SEQ ID NO: 404438 - DNA, 20 bp, Artificial Sequence
  Description of Artificial Sequence: Synthetic oligonucleotide
  Target: LAMA2; (+) strand; PAM type: YTN; PAM sequence: TTT
taatattcttataactcttc

SEQ ID NO: 404439 - DNA, 20 bp, Artificial Sequence
  Description of Artificial Sequence: Synthetic oligonucleotide
  Target: LAMA2; (+) strand; PAM type: YTN; PAM sequence: TTT
aatattcttataactcttcc

SEQ ID NO: 404440 - DNA, 20 bp, Artificial Sequence
  Description of Artificial Sequence: Synthetic oligonucleotide
  Target: LAMA2; (+) strand; PAM type: YTN; PAM sequence: TTA
atattcttataactcttcct

SEQ ID NO: 404441 - DNA, 20 bp, Artificial Sequence
  Description of Artificial Sequence: Synthetic oligonucleotide
  Target: LAMA2; (+) strand; PAM type: YTN; PAM sequence: TTC
ttataactcttcctatatgc

SEQ ID NO: 404442 - DNA, 20 bp, Artificial Sequence
  Description of Artificial Sequence: Synthetic oligonucleotide
  Target: LAMA2; (+) strand; PAM type: YTN; PAM sequence: CTT
ataactcttcctatatgcta

SEQ ID NO: 404443 - DNA, 20 bp, Artificial Sequence
  Description of Artificial Sequence: Synthetic oligonucleotide
  Target: LAMA2; (+) strand; PAM type: YTN; PAM sequence: TTA
taactcttcctatatgctaa

SEQ ID NO: 404444 - DNA, 20 bp, Artificial Sequence
  Description of Artificial Sequence: Synthetic oligonucleotide
  Target: LAMA2; (+) strand; PAM type: YTN; PAM sequence: CTC
ttcctatatgctaagtaatg

SEQ ID NO: 404445 - DNA, 20 bp, Artificial Sequence
  Description of Artificial Sequence: Synthetic oligonucleotide
  Target: LAMA2; (+) strand; PAM type: YTN; PAM sequence: CTT
cctatatgctaagtaatgtt

SEQ ID NO: 404446 - DNA, 20 bp, Artificial Sequence
  Description of Artificial Sequence: Synthetic oligonucleotide
  Target: LAMA2; (+) strand; PAM type: YTN; PAM sequence: TTC
ctatatgctaagtaatgttc

SEQ ID NO: 404447 - DNA, 20 bp, Artificial Sequence
  Description of Artificial Sequence: Synthetic oligonucleotide
  Target: LAMA2; (+) strand; PAM type: YTN; PAM sequence: CTA
tatgctaagtaatgttctca

SEQ ID NO: 404448 - DNA, 20 bp, Artificial Sequence
  Description of Artificial Sequence: Synthetic oligonucleotide
  Target: LAMA2; (+) strand; PAM type: YTN; PAM sequence: CTA
agtaatgttctcagtaattt

SEQ ID NO: 404449 - DNA, 20 bp, Artificial Sequence
  Description of Artificial Sequence: Synthetic oligonucleotide
  Target: LAMA2; (+) strand; PAM type: YTN; PAM sequence: TTC
tcagtaatttacatgaatta

SEQ ID NO: 404450 - DNA, 20 bp, Artificial Sequence
  Description of Artificial Sequence: Synthetic oligonucleotide
  Target: LAMA2; (+) strand; PAM type: YTN; PAM sequence: CTC
agtaatttacatgaattaac

SEQ ID NO: 404451 - DNA, 20 bp, Artificial Sequence
  Description of Artificial Sequence: Synthetic oligonucleotide
  Target: LAMA2; (+) strand; PAM type: YTN; PAM sequence: TTT
acatgaattaacttgtttaa

SEQ ID NO: 404452 - DNA, 20 bp, Artificial Sequence
  Description of Artificial Sequence: Synthetic oligonucleotide
  Target: LAMA2; (+) strand; PAM type: YTN; PAM sequence: TTA
catgaattaacttgtttaat

SEQ ID NO: 404453 - DNA, 20 bp, Artificial Sequence
  Description of Artificial Sequence: Synthetic oligonucleotide
  Target: LAMA2; (+) strand; PAM type: YTN; PAM sequence: TTA
acttgtttaatttttacaac

SEQ ID NO: 404454 - DNA, 20 bp, Artificial Sequence
  Description of Artificial Sequence: Synthetic oligonucleotide
  Target: LAMA2; (+) strand; PAM type: YTN; PAM sequence: CTT
gtttaatttttacaacaacc

SEQ ID NO: 404455 - DNA, 20 bp, Artificial Sequence
  Description of Artificial Sequence: Synthetic oligonucleotide
  Target: LAMA2; (+) strand; PAM type: YTN; PAM sequence: TTG
tttaatttttacaacaaccc

SEQ ID NO: 404456 - DNA, 20 bp, Artificial Sequence
  Description of Artificial Sequence: Synthetic oligonucleotide
  Target: LAMA2; (+) strand; PAM type: YTN; PAM sequence: TTT
aatttttacaacaaccccaa

SEQ ID NO: 404457 - DNA, 20 bp, Artificial Sequence
  Description of Artificial Sequence: Synthetic oligonucleotide
  Target: LAMA2; (+) strand; PAM type: YTN; PAM sequence: TTA
atttttacaacaaccccaaa

SEQ ID NO: 404458 - DNA, 20 bp, Artificial Sequence
  Description of Artificial Sequence: Synthetic oligonucleotide
  Target: LAMA2; (+) strand; PAM type: YTN; PAM sequence: TTT
ttacaacaaccccaaaaagt

SEQ ID NO: 404459 - DNA, 20 bp, Artificial Sequence
  Description of Artificial Sequence: Synthetic oligonucleotide
  Target: LAMA2; (+) strand; PAM type: YTN; PAM sequence: TTT
tacaacaaccccaaaaagta

SEQ ID NO: 404460 - DNA, 20 bp, Artificial Sequence
  Description of Artificial Sequence: Synthetic oligonucleotide
  Target: LAMA2; (+) strand; PAM type: YTN; PAM sequence: TTT
acaacaaccccaaaaagtat

SEQ ID NO: 404461 - DNA, 20 bp, Artificial Sequence
  Description of Artificial Sequence: Synthetic oligonucleotide
  Target: LAMA2; (+) strand; PAM type: YTN; PAM sequence: TTA
caacaaccccaaaaagtatg

SEQ ID NO: 404462 - DNA, 20 bp, Artificial Sequence
  Description of Artificial Sequence: Synthetic oligonucleotide
  Target: LAMA2; (+) strand; PAM type: YTN; PAM sequence: CTT
agtccattagggctgctata

SEQ ID NO: 404463 - DNA, 20 bp, Artificial Sequence
  Description of Artificial Sequence: Synthetic oligonucleotide
  Target: LAMA2; (+) strand; PAM type: YTN; PAM sequence: TTA
gtccattagggctgctataa

SEQ ID NO: 404464 - DNA, 20 bp, Artificial Sequence
  Description of Artificial Sequence: Synthetic oligonucleotide
  Target: LAMA2; (+) strand; PAM type: YTN; PAM sequence: TTA
gggctgctataagaaaaata

SEQ ID NO: 404465 - DNA, 20 bp, Artificial Sequence
  Description of Artificial Sequence: Synthetic oligonucleotide
  Target: LAMA2; (+) strand; PAM type: YTN; PAM sequence: CTG
ctataagaaaaataccatga

SEQ ID NO: 404466 - DNA, 20 bp, Artificial Sequence
  Description of Artificial Sequence: Synthetic oligonucleotide
  Target: LAMA2; (+) strand; PAM type: YTN; PAM sequence: CTA
taagaaaaataccatgaaac

SEQ ID NO: 404467 - DNA, 20 bp, Artificial Sequence
  Description of Artificial Sequence: Synthetic oligonucleotide
  Target: LAMA2; (+) strand; PAM type: YTN; PAM sequence: CTG
ggtagtttataaataaacaa

SEQ ID NO: 404468 - DNA, 20 bp, Artificial Sequence
  Description of Artificial Sequence: Synthetic oligonucleotide
  Target: LAMA2; (+) strand; PAM type: YTN; PAM sequence: TTT
ataaataaacaaacatttat

SEQ ID NO: 404469 - DNA, 20 bp, Artificial Sequence
  Description of Artificial Sequence: Synthetic oligonucleotide
  Target: LAMA2; (+) strand; PAM type: YTN; PAM sequence: TTA
taaataaacaaacatttatt

SEQ ID NO: 404470 - DNA, 20 bp, Artificial Sequence
  Description of Artificial Sequence: Synthetic oligonucleotide
  Target: LAMA2; (+) strand; PAM type: YTN; PAM sequence: TTT
atttctcacaattcttgaag

SEQ ID NO: 404471 - DNA, 20 bp, Artificial Sequence
  Description of Artificial Sequence: Synthetic oligonucleotide
  Target: LAMA2; (+) strand; PAM type: YTN; PAM sequence: TTA
tttctcacaattcttgaagc

SEQ ID NO: 404472 - DNA, 20 bp, Artificial Sequence
  Description of Artificial Sequence: Synthetic oligonucleotide
  Target: LAMA2; (+) strand; PAM type: YTN; PAM sequence: TTT
ctcacaattcttgaagctaa

SEQ ID NO: 404473 - DNA, 20 bp, Artificial Sequence
  Description of Artificial Sequence: Synthetic oligonucleotide
  Target: LAMA2; (+) strand; PAM type: YTN; PAM sequence: TTC
tcacaattcttgaagctaag

SEQ ID NO: 404474 - DNA, 20 bp, Artificial Sequence
  Description of Artificial Sequence: Synthetic oligonucleotide
  Target: LAMA2; (+) strand; PAM type: YTN; PAM sequence: CTC
acaattcttgaagctaagaa

SEQ ID NO: 404475 - DNA, 20 bp, Artificial Sequence
  Description of Artificial Sequence: Synthetic oligonucleotide
  Target: LAMA2; (+) strand; PAM type: YTN; PAM sequence: TTC
ttgaagctaagaagtctgag

SEQ ID NO: 404476 - DNA, 20 bp, Artificial Sequence
  Description of Artificial Sequence: Synthetic oligonucleotide
  Target: LAMA2; (+) strand; PAM type: YTN; PAM sequence: CTT
gaagctaagaagtctgagat

SEQ ID NO: 404477 - DNA, 20 bp, Artificial Sequence
  Description of Artificial Sequence: Synthetic oligonucleotide
  Target: LAMA2; (+) strand; PAM type: YTN; PAM sequence: TTG
aagctaagaagtctgagatc

SEQ ID NO: 404478 - DNA, 20 bp, Artificial Sequence
  Description of Artificial Sequence: Synthetic oligonucleotide
  Target: LAMA2; (+) strand; PAM type: YTN; PAM sequence: CTA
agaagtctgagatcaaggta

SEQ ID NO: 404479 - DNA, 20 bp, Artificial Sequence
  Description of Artificial Sequence: Synthetic oligonucleotide
  Target: LAMA2; (+) strand; PAM type: YTN; PAM sequence: CTG
agatcaaggtactggcagat

SEQ ID NO: 404480 - DNA, 20 bp, Artificial Sequence
  Description of Artificial Sequence: Synthetic oligonucleotide
  Target: LAMA2; (+) strand; PAM type: YTN; PAM sequence: CTG
gcagatttggtgtttagtga

SEQ ID NO: 404481 - DNA, 20 bp, Artificial Sequence
  Description of Artificial Sequence: Synthetic oligonucleotide
  Target: LAMA2; (+) strand; PAM type: YTN; PAM sequence: TTT
ggtgtttagtgagagccagt

SEQ ID NO: 404482 - DNA, 20 bp, Artificial Sequence
  Description of Artificial Sequence: Synthetic oligonucleotide
  Target: LAMA2; (+) strand; PAM type: YTN; PAM sequence: TTG
gtgtttagtgagagccagtt

SEQ ID NO: 404483 - DNA, 20 bp, Artificial Sequence
  Description of Artificial Sequence: Synthetic oligonucleotide
  Target: LAMA2; (+) strand; PAM type: YTN; PAM sequence: TTT
agtgagagccagtttttcat

SEQ ID NO: 404484 - DNA, 20 bp, Artificial Sequence
  Description of Artificial Sequence: Synthetic oligonucleotide
  Target: LAMA2; (+) strand; PAM type: YTN; PAM sequence: TTA
gtgagagccagtttttcata

SEQ ID NO: 404485 - DNA, 20 bp, Artificial Sequence
  Description of Artificial Sequence: Synthetic oligonucleotide
  Target: LAMA2; (+) strand; PAM type: YTN; PAM sequence: TTT
ttcatagaaggaggcttctt

SEQ ID NO: 404486 - DNA, 20 bp, Artificial Sequence
  Description of Artificial Sequence: Synthetic oligonucleotide
  Target: LAMA2; (+) strand; PAM type: YTN; PAM sequence: TTT
tcatagaaggaggcttcttg

SEQ ID NO: 404487 - DNA, 20 bp, Artificial Sequence
  Description of Artificial Sequence: Synthetic oligonucleotide
  Target: LAMA2; (+) strand; PAM type: YTN; PAM sequence: TTT
catagaaggaggcttcttgc

SEQ ID NO: 404488 - DNA, 20 bp, Artificial Sequence
  Description of Artificial Sequence: Synthetic oligonucleotide
  Target: LAMA2; (+) strand; PAM type: YTN; PAM sequence: TTC
atagaaggaggcttcttgct

SEQ ID NO: 404489 - DNA, 20 bp, Artificial Sequence
  Description of Artificial Sequence: Synthetic oligonucleotide
  Target: LAMA2; (+) strand; PAM type: YTN; PAM sequence: CTT
cttgctgttctcacatagta

SEQ ID NO: 404490 - DNA, 20 bp, Artificial Sequence
  Description of Artificial Sequence: Synthetic oligonucleotide
  Target: LAMA2; (+) strand; PAM type: YTN; PAM sequence: TTC
ttgctgttctcacatagtag

SEQ ID NO: 404491 - DNA, 20 bp, Artificial Sequence
  Description of Artificial Sequence: Synthetic oligonucleotide
  Target: LAMA2; (+) strand; PAM type: YTN; PAM sequence: CTT
gctgttctcacatagtagaa

SEQ ID NO: 404492 - DNA, 20 bp, Artificial Sequence
  Description of Artificial Sequence: Synthetic oligonucleotide
  Target: LAMA2; (+) strand; PAM type: YTN; PAM sequence: TTG
ctgttctcacatagtagaaa

SEQ ID NO: 404493 - DNA, 20 bp, Artificial Sequence
  Description of Artificial Sequence: Synthetic oligonucleotide
  Target: LAMA2; (+) strand; PAM type: YTN; PAM sequence: CTG
ttctcacatagtagaaagag

SEQ ID NO: 404494 - DNA, 20 bp, Artificial Sequence
  Description of Artificial Sequence: Synthetic oligonucleotide
  Target: LAMA2; (+) strand; PAM type: YTN; PAM sequence: TTC
tcacatagtagaaagagtga

SEQ ID NO: 404495 - DNA, 20 bp, Artificial Sequence
  Description of Artificial Sequence: Synthetic oligonucleotide
  Target: LAMA2; (+) strand; PAM type: YTN; PAM sequence: CTC
acatagtagaaagagtgaac

SEQ ID NO: 404496 - DNA, 20 bp, Artificial Sequence
  Description of Artificial Sequence: Synthetic oligonucleotide
  Target: LAMA2; (+) strand; PAM type: YTN; PAM sequence: CTC
ctttggacctattttataag

SEQ ID NO: 404497 - DNA, 20 bp, Artificial Sequence
  Description of Artificial Sequence: Synthetic oligonucleotide
  Target: LAMA2; (+) strand; PAM type: YTN; PAM sequence: CTT
tggacctattttataagggc

SEQ ID NO: 404498 - DNA, 20 bp, Artificial Sequence
  Description of Artificial Sequence: Synthetic oligonucleotide
  Target: LAMA2; (+) strand; PAM type: YTN; PAM sequence: TTT
ggacctattttataagggca

SEQ ID NO: 404499 - DNA, 20 bp, Artificial Sequence
  Description of Artificial Sequence: Synthetic oligonucleotide
  Target: LAMA2; (+) strand; PAM type: YTN; PAM sequence: TTG
gacctattttataagggcac

SEQ ID NO: 404500 - DNA, 20 bp, Artificial Sequence
  Description of Artificial Sequence: Synthetic oligonucleotide
  Target: LAMA2; (+) strand; PAM type: YTN; PAM sequence: CTA
ttttataagggcactaattt

SEQ ID NO: 404501 - DNA, 20 bp, Artificial Sequence
  Description of Artificial Sequence: Synthetic oligonucleotide
  Target: LAMA2; (+) strand; PAM type: YTN; PAM sequence: TTT
tataagggcactaatttcat

SEQ ID NO: 404502 - DNA, 20 bp, Artificial Sequence
  Description of Artificial Sequence: Synthetic oligonucleotide
  Target: LAMA2; (+) strand; PAM type: YTN; PAM sequence: TTT
ataagggcactaatttcatt

SEQ ID NO: 404503 - DNA, 20 bp, Artificial Sequence
  Description of Artificial Sequence: Synthetic oligonucleotide
  Target: LAMA2; (+) strand; PAM type: YTN; PAM sequence: TTA
taagggcactaatttcattc

SEQ ID NO: 404504 - DNA, 20 bp, Artificial Sequence
  Description of Artificial Sequence: Synthetic oligonucleotide
  Target: LAMA2; (+) strand; PAM type: YTN; PAM sequence: CTA
atttcattcatgaaggccct

SEQ ID NO: 404505 - DNA, 20 bp, Artificial Sequence
  Description of Artificial Sequence: Synthetic oligonucleotide
  Target: LAMA2; (+) strand; PAM type: YTN; PAM sequence: TTT
cattcatgaaggccctgccc

SEQ ID NO: 404506 - DNA, 20 bp, Artificial Sequence
  Description of Artificial Sequence: Synthetic oligonucleotide
  Target: LAMA2; (+) strand; PAM type: YTN; PAM sequence: TTC
attcatgaaggccctgcccc

SEQ ID NO: 404507 - DNA, 20 bp, Artificial Sequence
  Description of Artificial Sequence: Synthetic oligonucleotide
  Target: LAMA2; (+) strand; PAM type: YTN; PAM sequence: TTC
atgaaggccctgcccctcac

SEQ ID NO: 404508 - DNA, 20 bp, Artificial Sequence
  Description of Artificial Sequence: Synthetic oligonucleotide
  Target: LAMA2; (+) strand; PAM type: YTN; PAM sequence: CTG
cccctcaccatctaaaactc

SEQ ID NO: 404509 - DNA, 20 bp, Artificial Sequence
  Description of Artificial Sequence: Synthetic oligonucleotide
  Target: LAMA2; (+) strand; PAM type: YTN; PAM sequence: CTC
accatctaaaactcacctct

SEQ ID NO: 404510 - DNA, 20 bp, Artificial Sequence
  Description of Artificial Sequence: Synthetic oligonucleotide
  Target: LAMA2; (+) strand; PAM type: YTN; PAM sequence: CTA
aaactcacctctcaaatgcc

SEQ ID NO: 404511 - DNA, 20 bp, Artificial Sequence
  Description of Artificial Sequence: Synthetic oligonucleotide
  Target: LAMA2; (+) strand; PAM type: YTN; PAM sequence: CTC
acctctcaaatgccctgcct

SEQ ID NO: 404512 - DNA, 20 bp, Artificial Sequence
  Description of Artificial Sequence: Synthetic oligonucleotide
  Target: LAMA2; (+) strand; PAM type: YTN; PAM sequence: CTC
tcaaatgccctgcctgctaa

SEQ ID NO: 404513 - DNA, 20 bp, Artificial Sequence
  Description of Artificial Sequence: Synthetic oligonucleotide
  Target: LAMA2; (+) strand; PAM type: YTN; PAM sequence: CTC
aaatgccctgcctgctaata

SEQ ID NO: 404514 - DNA, 20 bp, Artificial Sequence
  Description of Artificial Sequence: Synthetic oligonucleotide
  Target: LAMA2; (+) strand; PAM type: YTN; PAM sequence: CTG
cctgctaataccatcacttt

SEQ ID NO: 404515 - DNA, 20 bp, Artificial Sequence
  Description of Artificial Sequence: Synthetic oligonucleotide
  Target: LAMA2; (+) strand; PAM type: YTN; PAM sequence: CTG
ctaataccatcactttggcg

SEQ ID NO: 404516 - DNA, 20 bp, Artificial Sequence
  Description of Artificial Sequence: Synthetic oligonucleotide
  Target: LAMA2; (+) strand; PAM type: YTN; PAM sequence: CTA
ataccatcactttggcgggt

SEQ ID NO: 404517 - DNA, 20 bp, Artificial Sequence
  Description of Artificial Sequence: Synthetic oligonucleotide
  Target: LAMA2; (+) strand; PAM type: YTN; PAM sequence: CTT
tggcgggtaggattttaaca

SEQ ID NO: 404518 - DNA, 20 bp, Artificial Sequence
  Description of Artificial Sequence: Synthetic oligonucleotide
  Target: LAMA2; (+) strand; PAM type: YTN; PAM sequence: TTT
ggcgggtaggattttaacat

SEQ ID NO: 404519 - DNA, 20 bp, Artificial Sequence
  Description of Artificial Sequence: Synthetic oligonucleotide
  Target: LAMA2; (+) strand; PAM type: YTN; PAM sequence: TTG
gcgggtaggattttaacata

SEQ ID NO: 404520 - DNA, 20 bp, Artificial Sequence
  Description of Artificial Sequence: Synthetic oligonucleotide
  Target: LAMA2; (+) strand; PAM type: YTN; PAM sequence: TTT
taacataagaattttgagag

SEQ ID NO: 404521 - DNA, 20 bp, Artificial Sequence
  Description of Artificial Sequence: Synthetic oligonucleotide
  Target: LAMA2; (+) strand; PAM type: YTN; PAM sequence: TTT
aacataagaattttgagagg

SEQ ID NO: 404522 - DNA, 20 bp, Artificial Sequence
  Description of Artificial Sequence: Synthetic oligonucleotide
  Target: LAMA2; (+) strand; PAM type: YTN; PAM sequence: TTA
acataagaattttgagaggg

SEQ ID NO: 404523 - DNA, 20 bp, Artificial Sequence
  Description of Artificial Sequence: Synthetic oligonucleotide
  Target: LAMA2; (+) strand; PAM type: YTN; PAM sequence: TTT
tgagagggacacagacattc

SEQ ID NO: 404524 - DNA, 20 bp, Artificial Sequence
  Description of Artificial Sequence: Synthetic oligonucleotide
  Target: LAMA2; (+) strand; PAM type: YTN; PAM sequence: TTT
gagagggacacagacattca

SEQ ID NO: 404525 - DNA, 20 bp, Artificial Sequence
  Description of Artificial Sequence: Synthetic oligonucleotide
  Target: LAMA2; (+) strand; PAM type: YTN; PAM sequence: TTG
agagggacacagacattcac

SEQ ID NO: 404526 - DNA, 20 bp, Artificial Sequence
  Description of Artificial Sequence: Synthetic oligonucleotide
  Target: LAMA2; (+) strand; PAM type: YTN; PAM sequence: TTC
acactatagcaaggcagata

SEQ ID NO: 404527 - DNA, 20 bp, Artificial Sequence
  Description of Artificial Sequence: Synthetic oligonucleotide
  Target: LAMA2; (+) strand; PAM type: YTN; PAM sequence: CTA
tagcaaggcagatactaata

SEQ ID NO: 404528 - DNA, 20 bp, Artificial Sequence
  Description of Artificial Sequence: Synthetic oligonucleotide
  Target: LAMA2; (+) strand; PAM type: YTN; PAM sequence: CTA
atattctcattctgtagtta

SEQ ID NO: 404529 - DNA, 20 bp, Artificial Sequence
  Description of Artificial Sequence: Synthetic oligonucleotide
  Target: LAMA2; (+) strand; PAM type: YTN; PAM sequence: TTC
tcattctgtagttaaggaat

SEQ ID NO: 404530 - DNA, 20 bp, Artificial Sequence
  Description of Artificial Sequence: Synthetic oligonucleotide
  Target: LAMA2; (+) strand; PAM type: YTN; PAM sequence: CTC
attctgtagttaaggaatct

SEQ ID NO: 404531 - DNA, 20 bp, Artificial Sequence
  Description of Artificial Sequence: Synthetic oligonucleotide
  Target: LAMA2; (+) strand; PAM type: YTN; PAM sequence: TTC
tgtagttaaggaatctgaag

SEQ ID NO: 404532 - DNA, 20 bp, Artificial Sequence
  Description of Artificial Sequence: Synthetic oligonucleotide
  Target: LAMA2; (+) strand; PAM type: YTN; PAM sequence: CTG
tagttaaggaatctgaagaa

SEQ ID NO: 404533 - DNA, 20 bp, Artificial Sequence
  Description of Artificial Sequence: Synthetic oligonucleotide
  Target: LAMA2; (+) strand; PAM type: YTN; PAM sequence: TTA
aggaatctgaagaagagaga

SEQ ID NO: 404534 - DNA, 20 bp, Artificial Sequence
  Description of Artificial Sequence: Synthetic oligonucleotide
  Target: LAMA2; (+) strand; PAM type: YTN; PAM sequence: CTG
aagaagagagatgttaaatg

SEQ ID NO: 404535 - DNA, 20 bp, Artificial Sequence
  Description of Artificial Sequence: Synthetic oligonucleotide
  Target: LAMA2; (+) strand; PAM type: YTN; PAM sequence: TTA
aatgtcttgaccatggtcac

SEQ ID NO: 404536 - DNA, 20 bp, Artificial Sequence
  Description of Artificial Sequence: Synthetic oligonucleotide
  Target: LAMA2; (+) strand; PAM type: YTN; PAM sequence: CTT
gaccatggtcacacagtaat

SEQ ID NO: 404537 - DNA, 20 bp, Artificial Sequence
  Description of Artificial Sequence: Synthetic oligonucleotide
  Target: LAMA2; (+) strand; PAM type: YTN; PAM sequence: TTG
accatggtcacacagtaatt

SEQ ID NO: 404538 - DNA, 20 bp, Artificial Sequence
  Description of Artificial Sequence: Synthetic oligonucleotide
  Target: LAMA2; (+) strand; PAM type: YTN; PAM sequence: TTA
gcagagctgggatttgaaca

SEQ ID NO: 404539 - DNA, 20 bp, Artificial Sequence
  Description of Artificial Sequence: Synthetic oligonucleotide
  Target: LAMA2; (+) strand; PAM type: YTN; PAM sequence: CTG
ggatttgaacataggttaat

SEQ ID NO: 404540 - DNA, 20 bp, Artificial Sequence
  Description of Artificial Sequence: Synthetic oligonucleotide
  Target: LAMA2; (+) strand; PAM type: YTN; PAM sequence: TTT
gaacataggttaataggcac

SEQ ID NO: 404541 - DNA, 20 bp, Artificial Sequence
  Description of Artificial Sequence: Synthetic oligonucleotide
  Target: LAMA2; (+) strand; PAM type: YTN; PAM sequence: TTG
aacataggttaataggcaca

SEQ ID NO: 404542 - DNA, 20 bp, Artificial Sequence
  Description of Artificial Sequence: Synthetic oligonucleotide
  Target: LAMA2; (+) strand; PAM type: YTN; PAM sequence: TTA
ataggcacagtggtcttcac

SEQ ID NO: 404543 - DNA, 20 bp, Artificial Sequence
  Description of Artificial Sequence: Synthetic oligonucleotide
  Target: LAMA2; (+) strand; PAM type: YTN; PAM sequence: CTT
cactctcaacatcttgcttc

SEQ ID NO: 404544 - DNA, 20 bp, Artificial Sequence
  Description of Artificial Sequence: Synthetic oligonucleotide
  Target: LAMA2; (+) strand; PAM type: YTN; PAM sequence: TTC
actctcaacatcttgcttca

SEQ ID NO: 404545 - DNA, 20 bp, Artificial Sequence
  Description of Artificial Sequence: Synthetic oligonucleotide
  Target: LAMA2; (+) strand; PAM type: YTN; PAM sequence: CTC
tcaacatcttgcttcactgc

SEQ ID NO: 404546 - DNA, 20 bp, Artificial Sequence
  Description of Artificial Sequence: Synthetic oligonucleotide
  Target: LAMA2; (+) strand; PAM type: YTN; PAM sequence: CTC
aacatcttgcttcactgcca

SEQ ID NO: 404547 - DNA, 20 bp, Artificial Sequence
  Description of Artificial Sequence: Synthetic oligonucleotide
  Target: LAMA2; (+) strand; PAM type: YTN; PAM sequence: CTT
gcttcactgccacaatgaat

SEQ ID NO: 404548 - DNA, 20 bp, Artificial Sequence
  Description of Artificial Sequence: Synthetic oligonucleotide
  Target: LAMA2; (+) strand; PAM type: YTN; PAM sequence: TTG
cttcactgccacaatgaata

SEQ ID NO: 404549 - DNA, 20 bp, Artificial Sequence
  Description of Artificial Sequence: Synthetic oligonucleotide
  Target: LAMA2; (+) strand; PAM type: YTN; PAM sequence: CTT
cactgccacaatgaatagtg

SEQ ID NO: 404550 - DNA, 20 bp, Artificial Sequence
  Description of Artificial Sequence: Synthetic oligonucleotide
  Target: LAMA2; (+) strand; PAM type: YTN; PAM sequence: TTC
actgccacaatgaatagtga

SEQ ID NO: 404551 - DNA, 20 bp, Artificial Sequence
  Description of Artificial Sequence: Synthetic oligonucleotide
  Target: LAMA2; (+) strand; PAM type: YTN; PAM sequence: CTG
ccacaatgaatagtgagaca

SEQ ID NO: 404552 - DNA, 20 bp, Artificial Sequence
  Description of Artificial Sequence: Synthetic oligonucleotide
  Target: LAMA2; (+) strand; PAM type: YTN; PAM sequence: CTA
ccatagagtgtgtgtataaa

SEQ ID NO: 404553 - DNA, 20 bp, Artificial Sequence
  Description of Artificial Sequence: Synthetic oligonucleotide
  Target: LAMA2; (+) strand; PAM type: YTN; PAM sequence: CTG
agatgtggtagtcacacctt

SEQ ID NO: 404554 - DNA, 20 bp, Artificial Sequence
  Description of Artificial Sequence: Synthetic oligonucleotide
  Target: LAMA2; (+) strand; PAM type: YTN; PAM sequence: CTT
aaattgtaccttaataatta

SEQ ID NO: 404555 - DNA, 20 bp, Artificial Sequence
  Description of Artificial Sequence: Synthetic oligonucleotide
  Target: LAMA2; (+) strand; PAM type: YTN; PAM sequence: TTA
aattgtaccttaataattat

SEQ ID NO: 404556 - DNA, 20 bp, Artificial Sequence
  Description of Artificial Sequence: Synthetic oligonucleotide
  Target: LAMA2; (+) strand; PAM type: YTN; PAM sequence: TTG
taccttaataattattatgc

SEQ ID NO: 404557 - DNA, 20 bp, Artificial Sequence
  Description of Artificial Sequence: Synthetic oligonucleotide
  Target: LAMA2; (+) strand; PAM type: YTN; PAM sequence: CTT
aataattattatgcaaatgt

SEQ ID NO: 404558 - DNA, 20 bp, Artificial Sequence
  Description of Artificial Sequence: Synthetic oligonucleotide
  Target: LAMA2; (+) strand; PAM type: YTN; PAM sequence: TTA
ataattattatgcaaatgta

SEQ ID NO: 404559 - DNA, 20 bp, Artificial Sequence
  Description of Artificial Sequence: Synthetic oligonucleotide
  Target: LAMA2; (+) strand; PAM type: YTN; PAM sequence: TTA
ttatgcaaatgtaattggca

SEQ ID NO: 404560 - DNA, 20 bp, Artificial Sequence
  Description of Artificial Sequence: Synthetic oligonucleotide
  Target: LAMA2; (+) strand; PAM type: YTN; PAM sequence: TTA
tgcaaatgtaattggcacaa

SEQ ID NO: 404561 - DNA, 20 bp, Artificial Sequence
  Description of Artificial Sequence: Synthetic oligonucleotide
  Target: LAMA2; (+) strand; PAM type: YTN; PAM sequence: TTG
gcacaaaaacagtattctat

SEQ ID NO: 404562 - DNA, 20 bp, Artificial Sequence
  Description of Artificial Sequence: Synthetic oligonucleotide
  Target: LAMA2; (+) strand; PAM type: YTN; PAM sequence: TTC
tatcagtctcagaaaaagaa

SEQ ID NO: 404563 - DNA, 20 bp, Artificial Sequence
  Description of Artificial Sequence: Synthetic oligonucleotide
  Target: LAMA2; (+) strand; PAM type: YTN; PAM sequence: CTA
tcagtctcagaaaaagaaag

SEQ ID NO: 404564 - DNA, 20 bp, Artificial Sequence
  Description of Artificial Sequence: Synthetic oligonucleotide
  Target: LAMA2; (+) strand; PAM type: YTN; PAM sequence: CTC
agaaaaagaaagaaaacatg

SEQ ID NO: 404565 - DNA, 20 bp, Artificial Sequence
  Description of Artificial Sequence: Synthetic oligonucleotide
  Target: LAMA2; (+) strand; PAM type: YTN; PAM sequence: CTA
tagcaaaccttaggaaatca

SEQ ID NO: 404566 - DNA, 20 bp, Artificial Sequence
  Description of Artificial Sequence: Synthetic oligonucleotide
  Target: LAMA2; (+) strand; PAM type: YTN; PAM sequence: CTT
aggaaatcattttggccaag

SEQ ID NO: 404567 - DNA, 20 bp, Artificial Sequence
  Description of Artificial Sequence: Synthetic oligonucleotide
  Target: LAMA2; (+) strand; PAM type: YTN; PAM sequence: TTA
ggaaatcattttggccaaga

SEQ ID NO: 404568 - DNA, 20 bp, Artificial Sequence
  Description of Artificial Sequence: Synthetic oligonucleotide
  Target: LAMA2; (+) strand; PAM type: YTN; PAM sequence: TTT
tggccaagaatttcaagact

SEQ ID NO: 404569 - DNA, 20 bp, Artificial Sequence
  Description of Artificial Sequence: Synthetic oligonucleotide
  Target: LAMA2; (+) strand; PAM type: YTN; PAM sequence: TTT
ggccaagaatttcaagacta

SEQ ID NO: 404570 - DNA, 20 bp, Artificial Sequence
  Description of Artificial Sequence: Synthetic oligonucleotide
  Target: LAMA2; (+) strand; PAM type: YTN; PAM sequence: TTG
gccaagaatttcaagactac

SEQ ID NO: 404571 - DNA, 20 bp, Artificial Sequence
  Description of Artificial Sequence: Synthetic oligonucleotide
  Target: LAMA2; (+) strand; PAM type: YTN; PAM sequence: TTT
caagactactgccacaccag

SEQ ID NO: 404572 - DNA, 20 bp, Artificial Sequence
  Description of Artificial Sequence: Synthetic oligonucleotide
  Target: LAMA2; (+) strand; PAM type: YTN; PAM sequence: TTC
aagactactgccacaccaga

SEQ ID NO: 404573 - DNA, 20 bp, Artificial Sequence
  Description of Artificial Sequence: Synthetic oligonucleotide
  Target: LAMA2; (+) strand; PAM type: YTN; PAM sequence: CTA
ctgccacaccagaatatgaa

SEQ ID NO: 404574 - DNA, 20 bp, Artificial Sequence
  Description of Artificial Sequence: Synthetic oligonucleotide
  Target: LAMA2; (+) strand; PAM type: YTN; PAM sequence: CTG
ccacaccagaatatgaacca

SEQ ID NO: 404575 - DNA, 20 bp, Artificial Sequence
  Description of Artificial Sequence: Synthetic oligonucleotide
  Target: LAMA2; (+) strand; PAM type: YTN; PAM sequence: CTG
aaaacaactaaatgaacttg

SEQ ID NO: 404576 - DNA, 20 bp, Artificial Sequence
  Description of Artificial Sequence: Synthetic oligonucleotide
  Target: LAMA2; (+) strand; PAM type: YTN; PAM sequence: CTA
aatgaacttgctcatgagaa

SEQ ID NO: 404577 - DNA, 20 bp, Artificial Sequence
  Description of Artificial Sequence: Synthetic oligonucleotide
  Target: LAMA2; (+) strand; PAM type: YTN; PAM sequence: CTT
gctcatgagaattcaaatga

SEQ ID NO: 404578 - DNA, 20 bp, Artificial Sequence
  Description of Artificial Sequence: Synthetic oligonucleotide
  Target: LAMA2; (+) strand; PAM type: YTN; PAM sequence: TTG
ctcatgagaattcaaatgag

SEQ ID NO: 404579 - DNA, 20 bp, Artificial Sequence
  Description of Artificial Sequence: Synthetic oligonucleotide
  Target: LAMA2; (+) strand; PAM type: YTN; PAM sequence: CTC
atgagaattcaaatgagcag

SEQ ID NO: 404580 - DNA, 20 bp, Artificial Sequence
  Description of Artificial Sequence: Synthetic oligonucleotide
  Target: LAMA2; (+) strand; PAM type: YTN; PAM sequence: TTC
aaatgagcaggaaaatctct

SEQ ID NO: 404581 - DNA, 20 bp, Artificial Sequence
  Description of Artificial Sequence: Synthetic oligonucleotide
  Target: LAMA2; (+) strand; PAM type: YTN; PAM sequence: CTC
tcaaatatagcttttcagga

SEQ ID NO: 404582 - DNA, 20 bp, Artificial Sequence
  Description of Artificial Sequence: Synthetic oligonucleotide
  Target: LAMA2; (+) strand; PAM type: YTN; PAM sequence: CTC
aaatatagcttttcaggatg

SEQ ID NO: 404583 - DNA, 20 bp, Artificial Sequence
  Description of Artificial Sequence: Synthetic oligonucleotide
  Target: LAMA2; (+) strand; PAM type: YTN; PAM sequence: CTT
ttcaggatgcaagaagaagc

SEQ ID NO: 404584 - DNA, 20 bp, Artificial Sequence
  Description of Artificial Sequence: Synthetic oligonucleotide
  Target: LAMA2; (+) strand; PAM type: YTN; PAM sequence: TTT
tcaggatgcaagaagaagca

SEQ ID NO: 404585 - DNA, 20 bp, Artificial Sequence
  Description of Artificial Sequence: Synthetic oligonucleotide
  Target: LAMA2; (+) strand; PAM type: YTN; PAM sequence: TTT
caggatgcaagaagaagcaa

SEQ ID NO: 404586 - DNA, 20 bp, Artificial Sequence
  Description of Artificial Sequence: Synthetic oligonucleotide
  Target: LAMA2; (+) strand; PAM type: YTN; PAM sequence: TTC
aggatgcaagaagaagcaaa

SEQ ID NO: 404587 - DNA, 20 bp, Artificial Sequence
  Description of Artificial Sequence: Synthetic oligonucleotide
  Target: LAMA2; (+) strand; PAM type: YTN; PAM sequence: TTC
acaagtaggataatcaatct

SEQ ID NO: 404588 - DNA, 20 bp, Artificial Sequence
  Description of Artificial Sequence: Synthetic oligonucleotide
  Target: LAMA2; (+) strand; PAM type: YTN; PAM sequence: CTC
tagaaaattaagaggttcag

SEQ ID NO: 404589 - DNA, 20 bp, Artificial Sequence
  Description of Artificial Sequence: Synthetic oligonucleotide
  Target: LAMA2; (+) strand; PAM type: YTN; PAM sequence: CTA
gaaaattaagaggttcagag

SEQ ID NO: 404590 - DNA, 20 bp, Artificial Sequence
  Description of Artificial Sequence: Synthetic oligonucleotide
  Target: LAMA2; (+) strand; PAM type: YTN; PAM sequence: TTA
agaggttcagagtgatgaca

SEQ ID NO: 404591 - DNA, 20 bp, Artificial Sequence
  Description of Artificial Sequence: Synthetic oligonucleotide
  Target: LAMA2; (+) strand; PAM type: YTN; PAM sequence: TTC
agagtgatgacagagcattg

SEQ ID NO: 404592 - DNA, 20 bp, Artificial Sequence
  Description of Artificial Sequence: Synthetic oligonucleotide
  Target: LAMA2; (+) strand; PAM type: YTN; PAM sequence: TTG
caaggacgactccaatgtgc

SEQ ID NO: 404593 - DNA, 20 bp, Artificial Sequence
  Description of Artificial Sequence: Synthetic oligonucleotide
  Target: LAMA2; (+) strand; PAM type: YTN; PAM sequence: CTC
caatgtgcaagtcaggggct

SEQ ID NO: 404594 - DNA, 20 bp, Artificial Sequence
  Description of Artificial Sequence: Synthetic oligonucleotide
  Target: LAMA2; (+) strand; PAM type: YTN; PAM sequence: CTC
cgatcaacaatctttctatg

SEQ ID NO: 404595 - DNA, 20 bp, Artificial Sequence
  Description of Artificial Sequence: Synthetic oligonucleotide
  Target: LAMA2; (+) strand; PAM type: YTN; PAM sequence: CTT
tctatgcggctgtgcaatac

SEQ ID NO: 404596 - DNA, 20 bp, Artificial Sequence
  Description of Artificial Sequence: Synthetic oligonucleotide
  Target: LAMA2; (+) strand; PAM type: YTN; PAM sequence: TTT
ctatgcggctgtgcaataca

SEQ ID NO: 404597 - DNA, 20 bp, Artificial Sequence
  Description of Artificial Sequence: Synthetic oligonucleotide
  Target: LAMA2; (+) strand; PAM type: YTN; PAM sequence: TTC
tatgcggctgtgcaatacat

SEQ ID NO: 404598 - DNA, 20 bp, Artificial Sequence
  Description of Artificial Sequence: Synthetic oligonucleotide
  Target: LAMA2; (+) strand; PAM type: YTN; PAM sequence: CTA
tgcggctgtgcaatacatgg

SEQ ID NO: 404599 - DNA, 20 bp, Artificial Sequence
  Description of Artificial Sequence: Synthetic oligonucleotide
  Target: LAMA2; (+) strand; PAM type: YTN; PAM sequence: CTG
tgcaatacatggtcacagca

SEQ ID NO: 404600 - DNA, 20 bp, Artificial Sequence
  Description of Artificial Sequence: Synthetic oligonucleotide
  Target: LAMA2; (+) strand; PAM type: YTN; PAM sequence: TTG
atgggtttaacctaaaacca

SEQ ID NO: 404601 - DNA, 20 bp, Artificial Sequence
  Description of Artificial Sequence: Synthetic oligonucleotide
  Target: LAMA2; (+) strand; PAM type: YTN; PAM sequence: TTT
aacctaaaaccatagcagta

SEQ ID NO: 404602 - DNA, 20 bp, Artificial Sequence
  Description of Artificial Sequence: Synthetic oligonucleotide
  Target: LAMA2; (+) strand; PAM type: YTN; PAM sequence: TTA
acctaaaaccatagcagtag

SEQ ID NO: 404603 - DNA, 20 bp, Artificial Sequence
  Description of Artificial Sequence: Synthetic oligonucleotide
  Target: LAMA2; (+) strand; PAM type: YTN; PAM sequence: CTA
aaaccatagcagtaggctat

SEQ ID NO: 404604 - DNA, 20 bp, Artificial Sequence
  Description of Artificial Sequence: Synthetic oligonucleotide
  Target: LAMA2; (+) strand; PAM type: YTN; PAM sequence: CTA
taccatagagcctaggtgtg

SEQ ID NO: 404605 - DNA, 20 bp, Artificial Sequence
  Description of Artificial Sequence: Synthetic oligonucleotide
  Target: LAMA2; (+) strand; PAM type: YTN; PAM sequence: CTA
ggtgtgtagtaggctatacc

SEQ ID NO: 404606 - DNA, 20 bp, Artificial Sequence
  Description of Artificial Sequence: Synthetic oligonucleotide
  Target: LAMA2; (+) strand; PAM type: YTN; PAM sequence: CTA
taccatctagatttgtgcaa

SEQ ID NO: 404607 - DNA, 20 bp, Artificial Sequence
  Description of Artificial Sequence: Synthetic oligonucleotide
  Target: LAMA2; (+) strand; PAM type: YTN; PAM sequence: CTA
gatttgtgcaagtactgtac

SEQ ID NO: 404608 - DNA, 20 bp, Artificial Sequence
  Description of Artificial Sequence: Synthetic oligonucleotide
  Target: LAMA2; (+) strand; PAM type: YTN; PAM sequence: TTT
gtgcaagtactgtacagtct

SEQ ID NO: 404609 - DNA, 20 bp, Artificial Sequence
  Description of Artificial Sequence: Synthetic oligonucleotide
  Target: LAMA2; (+) strand; PAM type: YTN; PAM sequence: TTG
tgcaagtactgtacagtcta

SEQ ID NO: 404610 - DNA, 20 bp, Artificial Sequence
  Description of Artificial Sequence: Synthetic oligonucleotide
  Target: LAMA2; (+) strand; PAM type: YTN; PAM sequence: CTG
tacagtctatgcttttaact

SEQ ID NO: 404611 - DNA, 20 bp, Artificial Sequence
  Description of Artificial Sequence: Synthetic oligonucleotide
  Target: LAMA2; (+) strand; PAM type: YTN; PAM sequence: CTA
tgcttttaactattcagtaa

SEQ ID NO: 404612 - DNA, 20 bp, Artificial Sequence
  Description of Artificial Sequence: Synthetic oligonucleotide
  Target: LAMA2; (+) strand; PAM type: YTN; PAM sequence: CTT
ttaactattcagtaactgat

SEQ ID NO: 404613 - DNA, 20 bp, Artificial Sequence
  Description of Artificial Sequence: Synthetic oligonucleotide
  Target: LAMA2; (+) strand; PAM type: YTN; PAM sequence: TTT
taactattcagtaactgatt

SEQ ID NO: 404614 - DNA, 20 bp, Artificial Sequence
  Description of Artificial Sequence: Synthetic oligonucleotide
  Target: LAMA2; (+) strand; PAM type: YTN; PAM sequence: TTT
aactattcagtaactgattt

SEQ ID NO: 404615 - DNA, 20 bp, Artificial Sequence
  Description of Artificial Sequence: Synthetic oligonucleotide
  Target: LAMA2; (+) strand; PAM type: YTN; PAM sequence: TTA
actattcagtaactgatttt

SEQ ID NO: 404616 - DNA, 20 bp, Artificial Sequence
  Description of Artificial Sequence: Synthetic oligonucleotide
  Target: LAMA2; (+) strand; PAM type: YTN; PAM sequence: CTA
ttcagtaactgattttacta

SEQ ID NO: 404617 - DNA, 20 bp, Artificial Sequence
  Description of Artificial Sequence: Synthetic oligonucleotide
  Target: LAMA2; (+) strand; PAM type: YTN; PAM sequence: TTC
agtaactgattttactattt

SEQ ID NO: 404618 - DNA, 20 bp, Artificial Sequence
  Description of Artificial Sequence: Synthetic oligonucleotide
  Target: LAMA2; (+) strand; PAM type: YTN; PAM sequence: CTG
attttactatttaaaatttt

SEQ ID NO: 404619 - DNA, 20 bp, Artificial Sequence
  Description of Artificial Sequence: Synthetic oligonucleotide
  Target: LAMA2; (+) strand; PAM type: YTN; PAM sequence: TTT
tactatttaaaattttaact

SEQ ID NO: 404620 - DNA, 20 bp, Artificial Sequence
  Description of Artificial Sequence: Synthetic oligonucleotide
  Target: LAMA2; (+) strand; PAM type: YTN; PAM sequence: TTT
actatttaaaattttaacta

SEQ ID NO: 404621 - DNA, 20 bp, Artificial Sequence
  Description of Artificial Sequence: Synthetic oligonucleotide
  Target: LAMA2; (+) strand; PAM type: YTN; PAM sequence: TTA
ctatttaaaattttaactat

SEQ ID NO: 404622 - DNA, 20 bp, Artificial Sequence
  Description of Artificial Sequence: Synthetic oligonucleotide
  Target: LAMA2; (+) strand; PAM type: YTN; PAM sequence: CTA
tttaaaattttaactattca

SEQ ID NO: 404623 - DNA, 20 bp, Artificial Sequence
  Description of Artificial Sequence: Synthetic oligonucleotide
  Target: LAMA2; (+) strand; PAM type: YTN; PAM sequence: TTT
aaaattttaactattcagta

SEQ ID NO: 404624 - DNA, 20 bp, Artificial Sequence
  Description of Artificial Sequence: Synthetic oligonucleotide
  Target: LAMA2; (+) strand; PAM type: YTN; PAM sequence: TTA
aaattttaactattcagtaa

SEQ ID NO: 404625 - DNA, 20 bp, Artificial Sequence
  Description of Artificial Sequence: Synthetic oligonucleotide
  Target: LAMA2; (+) strand; PAM type: YTN; PAM sequence: TTT
taactattcagtaactgttt

SEQ ID NO: 404626 - DNA, 20 bp, Artificial Sequence
  Description of Artificial Sequence: Synthetic oligonucleotide
  Target: LAMA2; (+) strand; PAM type: YTN; PAM sequence: TTT
aactattcagtaactgtttt

SEQ ID NO: 404627 - DNA, 20 bp, Artificial Sequence
  Description of Artificial Sequence: Synthetic oligonucleotide
  Target: LAMA2; (+) strand; PAM type: YTN; PAM sequence: TTA
actattcagtaactgttttc

SEQ ID NO: 404628 - DNA, 20 bp, Artificial Sequence
  Description of Artificial Sequence: Synthetic oligonucleotide
  Target: LAMA2; (+) strand; PAM type: YTN; PAM sequence: CTA
ttcagtaactgttttcttat

SEQ ID NO: 404629 - DNA, 20 bp, Artificial Sequence
  Description of Artificial Sequence: Synthetic oligonucleotide
  Target: LAMA2; (+) strand; PAM type: YTN; PAM sequence: TTC
agtaactgttttcttatgtg

SEQ ID NO: 404630 - DNA, 20 bp, Artificial Sequence
  Description of Artificial Sequence: Synthetic oligonucleotide
  Target: LAMA2; (+) strand; PAM type: YTN; PAM sequence: CTG
ttttcttatgtgtgttctaa

SEQ ID NO: 404631 - DNA, 20 bp, Artificial Sequence
  Description of Artificial Sequence: Synthetic oligonucleotide
  Target: LAMA2; (+) strand; PAM type: YTN; PAM sequence: TTT
tcttatgtgtgttctaaaaa

SEQ ID NO: 404632 - DNA, 20 bp, Artificial Sequence
  Description of Artificial Sequence: Synthetic oligonucleotide
  Target: LAMA2; (+) strand; PAM type: YTN; PAM sequence: TTT
cttatgtgtgttctaaaaac

SEQ ID NO: 404633 - DNA, 20 bp, Artificial Sequence
  Description of Artificial Sequence: Synthetic oligonucleotide
  Target: LAMA2; (+) strand; PAM type: YTN; PAM sequence: TTC
ttatgtgtgttctaaaaacc

SEQ ID NO: 404634 - DNA, 20 bp, Artificial Sequence
  Description of Artificial Sequence: Synthetic oligonucleotide
  Target: LAMA2; (+) strand; PAM type: YTN; PAM sequence: CTT
atgtgtgttctaaaaaccaa

SEQ ID NO: 404635 - DNA, 20 bp, Artificial Sequence
  Description of Artificial Sequence: Synthetic oligonucleotide
  Target: LAMA2; (+) strand; PAM type: YTN; PAM sequence: TTA
tgtgtgttctaaaaaccaaa

SEQ ID NO: 404636 - DNA, 20 bp, Artificial Sequence
  Description of Artificial Sequence: Synthetic oligonucleotide
  Target: LAMA2; (+) strand; PAM type: YTN; PAM sequence: TTC
taaaaaccaaatgagtcaat

SEQ ID NO: 404637 - DNA, 20 bp, Artificial Sequence
  Description of Artificial Sequence: Synthetic oligonucleotide
  Target: LAMA2; (+) strand; PAM type: YTN; PAM sequence: CTA
aaaaccaaatgagtcaatgc

SEQ ID NO: 404638 - DNA, 20 bp, Artificial Sequence
  Description of Artificial Sequence: Synthetic oligonucleotide
  Target: LAMA2; (+) strand; PAM type: YTN; PAM sequence: TTT
ttcccagataatctgagtaa

SEQ ID NO: 404639 - DNA, 20 bp, Artificial Sequence
  Description of Artificial Sequence: Synthetic oligonucleotide
  Target: LAMA2; (+) strand; PAM type: YTN; PAM sequence: TTT
tcccagataatctgagtaaa

SEQ ID NO: 404640 - DNA, 20 bp, Artificial Sequence
  Description of Artificial Sequence: Synthetic oligonucleotide
  Target: LAMA2; (+) strand; PAM type: YTN; PAM sequence: TTT
cccagataatctgagtaaat

SEQ ID NO: 404641 - DNA, 20 bp, Artificial Sequence
  Description of Artificial Sequence: Synthetic oligonucleotide
  Target: LAMA2; (+) strand; PAM type: YTN; PAM sequence: TTC
ccagataatctgagtaaata

SEQ ID NO: 404642 - DNA, 20 bp, Artificial Sequence
  Description of Artificial Sequence: Synthetic oligonucleotide
  Target: LAMA2; (+) strand; PAM type: YTN; PAM sequence: CTG
agtaaatatgggttcacttt

SEQ ID NO: 404643 - DNA, 20 bp, Artificial Sequence
  Description of Artificial Sequence: Synthetic oligonucleotide
  Target: LAMA2; (+) strand; PAM type: YTN; PAM sequence: TTC
actttggcacagagttttta

SEQ ID NO: 404644 - DNA, 20 bp, Artificial Sequence
  Description of Artificial Sequence: Synthetic oligonucleotide
  Target: LAMA2; (+) strand; PAM type: YTN; PAM sequence: CTT
tggcacagagtttttaaagt

SEQ ID NO: 404645 - DNA, 20 bp, Artificial Sequence
  Description of Artificial Sequence: Synthetic oligonucleotide
  Target: LAMA2; (+) strand; PAM type: YTN; PAM sequence: TTT
ggcacagagtttttaaagtt

SEQ ID NO: 404646 - DNA, 20 bp, Artificial Sequence
  Description of Artificial Sequence: Synthetic oligonucleotide
  Target: LAMA2; (+) strand; PAM type: YTN; PAM sequence: TTG
gcacagagtttttaaagttg

SEQ ID NO: 404647 - DNA, 20 bp, Artificial Sequence
  Description of Artificial Sequence: Synthetic oligonucleotide
  Target: LAMA2; (+) strand; PAM type: YTN; PAM sequence: TTT
ttaaagttgtaggcaccaga

SEQ ID NO: 404648 - DNA, 20 bp, Artificial Sequence
  Description of Artificial Sequence: Synthetic oligonucleotide
  Target: LAMA2; (+) strand; PAM type: YTN; PAM sequence: TTT
taaagttgtaggcaccagaa

SEQ ID NO: 404649 - DNA, 20 bp, Artificial Sequence
  Description of Artificial Sequence: Synthetic oligonucleotide
  Target: LAMA2; (+) strand; PAM type: YTN; PAM sequence: TTT
aaagttgtaggcaccagaat

SEQ ID NO: 404650 - DNA, 20 bp, Artificial Sequence
  Description of Artificial Sequence: Synthetic oligonucleotide
  Target: LAMA2; (+) strand; PAM type: YTN; PAM sequence: TTA
aagttgtaggcaccagaata

SEQ ID NO: 404651 - DNA, 20 bp, Artificial Sequence
  Description of Artificial Sequence: Synthetic oligonucleotide
  Target: LAMA2; (+) strand; PAM type: YTN; PAM sequence: TTG
taggcaccagaatataatac

SEQ ID NO: 404652 - DNA, 20 bp, Artificial Sequence
  Description of Artificial Sequence: Synthetic oligonucleotide
  Target: LAMA2; (+) strand; PAM type: YTN; PAM sequence: CTC
aatgacaagaatacattctg

SEQ ID NO: 404653 - DNA, 20 bp, Artificial Sequence
  Description of Artificial Sequence: Synthetic oligonucleotide
  Target: LAMA2; (+) strand; PAM type: YTN; PAM sequence: TTC
tgagaaagttggaattaggc

SEQ ID NO: 404654 - DNA, 20 bp, Artificial Sequence
  Description of Artificial Sequence: Synthetic oligonucleotide
  Target: LAMA2; (+) strand; PAM type: YTN; PAM sequence: CTG
agaaagttggaattaggcaa

SEQ ID NO: 404655 - DNA, 20 bp, Artificial Sequence
  Description of Artificial Sequence: Synthetic oligonucleotide
  Target: LAMA2; (+) strand; PAM type: YTN; PAM sequence: TTG
gaattaggcaatttcctcaa

SEQ ID NO: 404656 - DNA, 20 bp, Artificial Sequence
  Description of Artificial Sequence: Synthetic oligonucleotide
  Target: LAMA2; (+) strand; PAM type: YTN; PAM sequence: TTA
ggcaatttcctcaatgtgca

SEQ ID NO: 404657 - DNA, 20 bp, Artificial Sequence
  Description of Artificial Sequence: Synthetic oligonucleotide
  Target: LAMA2; (+) strand; PAM type: YTN; PAM sequence: TTT
cctcaatgtgcaaacatcat

SEQ ID NO: 404658 - DNA, 20 bp, Artificial Sequence
  Description of Artificial Sequence: Synthetic oligonucleotide
  Target: LAMA2; (+) strand; PAM type: YTN; PAM sequence: TTC
ctcaatgtgcaaacatcata

SEQ ID NO: 404659 - DNA, 20 bp, Artificial Sequence
  Description of Artificial Sequence: Synthetic oligonucleotide
  Target: LAMA2; (+) strand; PAM type: YTN; PAM sequence: CTC
aatgtgcaaacatcataaag

SEQ ID NO: 404660 - DNA, 20 bp, Artificial Sequence
  Description of Artificial Sequence: Synthetic oligonucleotide
  Target: LAMA2; (+) strand; PAM type: YTN; PAM sequence: CTT
gcacaaatctagatggtaca

SEQ ID NO: 404661 - DNA, 20 bp, Artificial Sequence
  Description of Artificial Sequence: Synthetic oligonucleotide
  Target: LAMA2; (+) strand; PAM type: YTN; PAM sequence: TTG
cacaaatctagatggtacag

SEQ ID NO: 404662 - DNA, 20 bp, Artificial Sequence
  Description of Artificial Sequence: Synthetic oligonucleotide
  Target: LAMA2; (+) strand; PAM type: YTN; PAM sequence: CTA
gatggtacagcctactacac

SEQ ID NO: 404663 - DNA, 20 bp, Artificial Sequence
  Description of Artificial Sequence: Synthetic oligonucleotide
  Target: LAMA2; (+) strand; PAM type: YTN; PAM sequence: CTA
ctacacacctaggctttatg

SEQ ID NO: 404664 - DNA, 20 bp, Artificial Sequence
  Description of Artificial Sequence: Synthetic oligonucleotide
  Target: LAMA2; (+) strand; PAM type: YTN; PAM sequence: CTA
cacacctaggctttatggta

SEQ ID NO: 404665 - DNA, 20 bp, Artificial Sequence
  Description of Artificial Sequence: Synthetic oligonucleotide
  Target: LAMA2; (+) strand; PAM type: YTN; PAM sequence: CTA
ggctttatggtatagcctac

SEQ ID NO: 404666 - DNA, 20 bp, Artificial Sequence
  Description of Artificial Sequence: Synthetic oligonucleotide
  Target: LAMA2; (+) strand; PAM type: YTN; PAM sequence: CTT
tatggtatagcctactgctc

SEQ ID NO: 404667 - DNA, 20 bp, Artificial Sequence
  Description of Artificial Sequence: Synthetic oligonucleotide
  Target: LAMA2; (+) strand; PAM type: YTN; PAM sequence: TTT
atggtatagcctactgctcc

SEQ ID NO: 404668 - DNA, 20 bp, Artificial Sequence
  Description of Artificial Sequence: Synthetic oligonucleotide
  Target: LAMA2; (+) strand; PAM type: YTN; PAM sequence: TTA
tggtatagcctactgctcca

SEQ ID NO: 404669 - DNA, 20 bp, Artificial Sequence
  Description of Artificial Sequence: Synthetic oligonucleotide
  Target: LAMA2; (+) strand; PAM type: YTN; PAM sequence: CTA
ctgctccaaggctagagcct

SEQ ID NO: 404670 - DNA, 20 bp, Artificial Sequence
  Description of Artificial Sequence: Synthetic oligonucleotide
  Target: LAMA2; (+) strand; PAM type: YTN; PAM sequence: CTG
ctccaaggctagagcctgta

SEQ ID NO: 404671 - DNA, 20 bp, Artificial Sequence
  Description of Artificial Sequence: Synthetic oligonucleotide
  Target: LAMA2; (+) strand; PAM type: YTN; PAM sequence: CTC
caaggctagagcctgtacag

SEQ ID NO: 404672 - DNA, 20 bp, Artificial Sequence
  Description of Artificial Sequence: Synthetic oligonucleotide
  Target: LAMA2; (+) strand; PAM type: YTN; PAM sequence: CTA
gagcctgtacagcatgttcc

SEQ ID NO: 404673 - DNA, 20 bp, Artificial Sequence
  Description of Artificial Sequence: Synthetic oligonucleotide
  Target: LAMA2; (+) strand; PAM type: YTN; PAM sequence: CTG
tacagcatgttcctccactg

SEQ ID NO: 404674 - DNA, 20 bp, Artificial Sequence
  Description of Artificial Sequence: Synthetic oligonucleotide
  Target: LAMA2; (+) strand; PAM type: YTN; PAM sequence: TTC
ctccactgaatgctgtaggc

SEQ ID NO: 404675 - DNA, 20 bp, Artificial Sequence
  Description of Artificial Sequence: Synthetic oligonucleotide
  Target: LAMA2; (+) strand; PAM type: YTN; PAM sequence: CTC
cactgaatgctgtaggcagt

SEQ ID NO: 404676 - DNA, 20 bp, Artificial Sequence
  Description of Artificial Sequence: Synthetic oligonucleotide
  Target: LAMA2; (+) strand; PAM type: YTN; PAM sequence: CTG
aatgctgtaggcagttgtaa

SEQ ID NO: 404677 - DNA, 20 bp, Artificial Sequence
  Description of Artificial Sequence: Synthetic oligonucleotide
  Target: LAMA2; (+) strand; PAM type: YTN; PAM sequence: CTG
taggcagttgtaactcaatg

SEQ ID NO: 404678 - DNA, 20 bp, Artificial Sequence
  Description of Artificial Sequence: Synthetic oligonucleotide
  Target: LAMA2; (+) strand; PAM type: YTN; PAM sequence: TTG
taactcaatggtaagtattt

SEQ ID NO: 404679 - DNA, 20 bp, Artificial Sequence
  Description of Artificial Sequence: Synthetic oligonucleotide
  Target: LAMA2; (+) strand; PAM type: YTN; PAM sequence: CTC
aatggtaagtatttgtgtac

SEQ ID NO: 404680 - DNA, 20 bp, Artificial Sequence
  Description of Artificial Sequence: Synthetic oligonucleotide
  Target: LAMA2; (+) strand; PAM type: YTN; PAM sequence: TTT
gtgtacctaaacataaacaa

SEQ ID NO: 404681 - DNA, 20 bp, Artificial Sequence
  Description of Artificial Sequence: Synthetic oligonucleotide
  Target: LAMA2; (+) strand; PAM type: YTN; PAM sequence: TTG
tgtacctaaacataaacaag

SEQ ID NO: 404682 - DNA, 20 bp, Artificial Sequence
  Description of Artificial Sequence: Synthetic oligonucleotide
  Target: LAMA2; (+) strand; PAM type: YTN; PAM sequence: CTA
aacataaacaaggtacagta

SEQ ID NO: 404683 - DNA, 20 bp, Artificial Sequence
  Description of Artificial Sequence: Synthetic oligonucleotide
  Target: LAMA2; (+) strand; PAM type: YTN; PAM sequence: TTA
taattttatggaagcaccat

SEQ ID NO: 404684 - DNA, 20 bp, Artificial Sequence
  Description of Artificial Sequence: Synthetic oligonucleotide
  Target: LAMA2; (+) strand; PAM type: YTN; PAM sequence: TTT
tatggaagcaccatcatata

SEQ ID NO: 404685 - DNA, 20 bp, Artificial Sequence
  Description of Artificial Sequence: Synthetic oligonucleotide
  Target: LAMA2; (+) strand; PAM type: YTN; PAM sequence: TTT
atggaagcaccatcatatat

SEQ ID NO: 404686 - DNA, 20 bp, Artificial Sequence
  Description of Artificial Sequence: Synthetic oligonucleotide
  Target: LAMA2; (+) strand; PAM type: YTN; PAM sequence: TTA
tggaagcaccatcatatatg

SEQ ID NO: 404687 - DNA, 20 bp, Artificial Sequence
  Description of Artificial Sequence: Synthetic oligonucleotide
  Target: LAMA2; (+) strand; PAM type: YTN; PAM sequence: CTG
tcatttaccaaaacatttgt

SEQ ID NO: 404688 - DNA, 20 bp, Artificial Sequence
  Description of Artificial Sequence: Synthetic oligonucleotide
  Target: LAMA2; (+) strand; PAM type: YTN; PAM sequence: TTT
accaaaacatttgtaatgtg

SEQ ID NO: 404689 - DNA, 20 bp, Artificial Sequence
  Description of Artificial Sequence: Synthetic oligonucleotide
  Target: LAMA2; (+) strand; PAM type: YTN; PAM sequence: TTA
ccaaaacatttgtaatgtgt

SEQ ID NO: 404690 - DNA, 20 bp, Artificial Sequence
  Description of Artificial Sequence: Synthetic oligonucleotide
  Target: LAMA2; (+) strand; PAM type: YTN; PAM sequence: TTT
gtaatgtgtcaatgccaaaa

SEQ ID NO: 404691 - DNA, 20 bp, Artificial Sequence
  Description of Artificial Sequence: Synthetic oligonucleotide
  Target: LAMA2; (+) strand; PAM type: YTN; PAM sequence: TTG
taatgtgtcaatgccaaaac

SEQ ID NO: 404692 - DNA, 20 bp, Artificial Sequence
  Description of Artificial Sequence: Synthetic oligonucleotide
  Target: LAMA2; (+) strand; PAM type: YTN; PAM sequence: TTG
tttcaatttacaacaaactt

SEQ ID NO: 404693 - DNA, 20 bp, Artificial Sequence
  Description of Artificial Sequence: Synthetic oligonucleotide
  Target: LAMA2; (+) strand; PAM type: YTN; PAM sequence: TTT
caatttacaacaaacttctc

SEQ ID NO: 404694 - DNA, 20 bp, Artificial Sequence
  Description of Artificial Sequence: Synthetic oligonucleotide
  Target: LAMA2; (+) strand; PAM type: YTN; PAM sequence: TTC
aatttacaacaaacttctct

SEQ ID NO: 404695 - DNA, 20 bp, Artificial Sequence
  Description of Artificial Sequence: Synthetic oligonucleotide
  Target: LAMA2; (+) strand; PAM type: YTN; PAM sequence: TTT
acaacaaacttctctaggag

SEQ ID NO: 404696 - DNA, 20 bp, Artificial Sequence
  Description of Artificial Sequence: Synthetic oligonucleotide
  Target: LAMA2; (+) strand; PAM type: YTN; PAM sequence: TTA
caacaaacttctctaggagg

SEQ ID NO: 404697 - DNA, 20 bp, Artificial Sequence
  Description of Artificial Sequence: Synthetic oligonucleotide
  Target: LAMA2; (+) strand; PAM type: YTN; PAM sequence: CTT
ctctaggagggaccaggtca

SEQ ID NO: 404698 - DNA, 20 bp, Artificial Sequence
  Description of Artificial Sequence: Synthetic oligonucleotide
  Target: LAMA2; (+) strand; PAM type: YTN; PAM sequence: TTC
tctaggagggaccaggtcat

SEQ ID NO: 404699 - DNA, 20 bp, Artificial Sequence
  Description of Artificial Sequence: Synthetic oligonucleotide
  Target: LAMA2; (+) strand; PAM type: YTN; PAM sequence: CTC
taggagggaccaggtcattc

SEQ ID NO: 404700 - DNA, 20 bp, Artificial Sequence
  Description of Artificial Sequence: Synthetic oligonucleotide
  Target: LAMA2; (+) strand; PAM type: YTN; PAM sequence: CTA
ggagggaccaggtcattctc

SEQ ID NO: 404701 - DNA, 20 bp, Artificial Sequence
  Description of Artificial Sequence: Synthetic oligonucleotide
  Target: LAMA2; (+) strand; PAM type: YTN; PAM sequence: TTC
tctttcttcatgattgtgta

SEQ ID NO: 404702 - DNA, 20 bp, Artificial Sequence
  Description of Artificial Sequence: Synthetic oligonucleotide
  Target: LAMA2; (+) strand; PAM type: YTN; PAM sequence: CTC
tttcttcatgattgtgtatc

SEQ ID NO: 404703 - DNA, 20 bp, Artificial Sequence
  Description of Artificial Sequence: Synthetic oligonucleotide
  Target: LAMA2; (+) strand; PAM type: YTN; PAM sequence: CTT
tcttcatgattgtgtatcaa

SEQ ID NO: 404704 - DNA, 20 bp, Artificial Sequence
  Description of Artificial Sequence: Synthetic oligonucleotide
  Target: LAMA2; (+) strand; PAM type: YTN; PAM sequence: TTT
cttcatgattgtgtatcaag

SEQ ID NO: 404705 - DNA, 20 bp, Artificial Sequence
  Description of Artificial Sequence: Synthetic oligonucleotide
  Target: LAMA2; (+) strand; PAM type: YTN; PAM sequence: TTC
ttcatgattgtgtatcaagc

SEQ ID NO: 404706 - DNA, 20 bp, Artificial Sequence
  Description of Artificial Sequence: Synthetic oligonucleotide
  Target: LAMA2; (+) strand; PAM type: YTN; PAM sequence: CTT
catgattgtgtatcaagcct

SEQ ID NO: 404707 - DNA, 20 bp, Artificial Sequence
  Description of Artificial Sequence: Synthetic oligonucleotide
  Target: LAMA2; (+) strand; PAM type: YTN; PAM sequence: TTC
atgattgtgtatcaagccta

SEQ ID NO: 404708 - DNA, 20 bp, Artificial Sequence
  Description of Artificial Sequence: Synthetic oligonucleotide
  Target: LAMA2; (+) strand; PAM type: YTN; PAM sequence: TTG
tgtatcaagcctaagacttt

SEQ ID NO: 404709 - DNA, 20 bp, Artificial Sequence
  Description of Artificial Sequence: Synthetic oligonucleotide
  Target: LAMA2; (+) strand; PAM type: YTN; PAM sequence: CTA
agacttttcctgtgaaaatg

SEQ ID NO: 404710 - DNA, 20 bp, Artificial Sequence
  Description of Artificial Sequence: Synthetic oligonucleotide
  Target: LAMA2; (+) strand; PAM type: YTN; PAM sequence: CTT
ttcctgtgaaaatgacacca

SEQ ID NO: 404711 - DNA, 20 bp, Artificial Sequence
  Description of Artificial Sequence: Synthetic oligonucleotide
  Target: LAMA2; (+) strand; PAM type: YTN; PAM sequence: TTT
tcctgtgaaaatgacaccag

SEQ ID NO: 404712 - DNA, 20 bp, Artificial Sequence
  Description of Artificial Sequence: Synthetic oligonucleotide
  Target: LAMA2; (+) strand; PAM type: YTN; PAM sequence: TTT
cctgtgaaaatgacaccagg

SEQ ID NO: 404713 - DNA, 20 bp, Artificial Sequence
  Description of Artificial Sequence: Synthetic oligonucleotide
  Target: LAMA2; (+) strand; PAM type: YTN; PAM sequence: TTC
ctgtgaaaatgacaccagga

SEQ ID NO: 404714 - DNA, 20 bp, Artificial Sequence
  Description of Artificial Sequence: Synthetic oligonucleotide
  Target: LAMA2; (+) strand; PAM type: YTN; PAM sequence: CTG
tgaaaatgacaccaggattg

SEQ ID NO: 404715 - DNA, 20 bp, Artificial Sequence
  Description of Artificial Sequence: Synthetic oligonucleotide
  Target: LAMA2; (+) strand; PAM type: YTN; PAM sequence: TTG
aatttgatcagattatttgt

SEQ ID NO: 404716 - DNA, 20 bp, Artificial Sequence
  Description of Artificial Sequence: Synthetic oligonucleotide
  Target: LAMA2; (+) strand; PAM type: YTN; PAM sequence: TTT
gatcagattatttgtcgatt

SEQ ID NO: 404717 - DNA, 20 bp, Artificial Sequence
  Description of Artificial Sequence: Synthetic oligonucleotide
  Target: LAMA2; (+) strand; PAM type: YTN; PAM sequence: TTG
atcagattatttgtcgattc

SEQ ID NO: 404718 - DNA, 20 bp, Artificial Sequence
  Description of Artificial Sequence: Synthetic oligonucleotide
  Target: LAMA2; (+) strand; PAM type: YTN; PAM sequence: TTA
tttgtcgattctctatttga

SEQ ID NO: 404719 - DNA, 20 bp, Artificial Sequence
  Description of Artificial Sequence: Synthetic oligonucleotide
  Target: LAMA2; (+) strand; PAM type: YTN; PAM sequence: TTT
gtcgattctctatttgactc

SEQ ID NO: 404720 - DNA, 20 bp, Artificial Sequence
  Description of Artificial Sequence: Synthetic oligonucleotide
  Target: LAMA2; (+) strand; PAM type: YTN; PAM sequence: TTG
tcgattctctatttgactcc

SEQ ID NO: 404721 - DNA, 20 bp, Artificial Sequence
  Description of Artificial Sequence: Synthetic oligonucleotide
  Target: LAMA2; (+) strand; PAM type: YTN; PAM sequence: TTC
tctatttgactccaggccct

SEQ ID NO: 404722 - DNA, 20 bp, Artificial Sequence
  Description of Artificial Sequence: Synthetic oligonucleotide
  Target: LAMA2; (+) strand; PAM type: YTN; PAM sequence: CTC
tatttgactccaggccctgt

SEQ ID NO: 404723 - DNA, 20 bp, Artificial Sequence
  Description of Artificial Sequence: Synthetic oligonucleotide
  Target: LAMA2; (+) strand; PAM type: YTN; PAM sequence: CTA
tttgactccaggccctgtgc

SEQ ID NO: 404724 - DNA, 20 bp, Artificial Sequence
  Description of Artificial Sequence: Synthetic oligonucleotide
  Target: LAMA2; (+) strand; PAM type: YTN; PAM sequence: TTT
gactccaggccctgtgctgt

SEQ ID NO: 404725 - DNA, 20 bp, Artificial Sequence
  Description of Artificial Sequence: Synthetic oligonucleotide
  Target: LAMA2; (+) strand; PAM type: YTN; PAM sequence: TTG
actccaggccctgtgctgtg

SEQ ID NO: 404726 - DNA, 20 bp, Artificial Sequence
  Description of Artificial Sequence: Synthetic oligonucleotide
  Target: LAMA2; (+) strand; PAM type: YTN; PAM sequence: CTC
caggccctgtgctgtgtata

SEQ ID NO: 404727 - DNA, 20 bp, Artificial Sequence
  Description of Artificial Sequence: Synthetic oligonucleotide
  Target: LAMA2; (+) strand; PAM type: YTN; PAM sequence: CTG
tgctgtgtatacaagcaaac

SEQ ID NO: 404728 - DNA, 20 bp, Artificial Sequence
  Description of Artificial Sequence: Synthetic oligonucleotide
  Target: LAMA2; (+) strand; PAM type: YTN; PAM sequence: CTG
tgtatacaagcaaacgacac

SEQ ID NO: 404729 - DNA, 20 bp, Artificial Sequence
  Description of Artificial Sequence: Synthetic oligonucleotide
  Target: LAMA2; (+) strand; PAM type: YTN; PAM sequence: CTC
atttcctacaaagttgctta

SEQ ID NO: 404730 - DNA, 20 bp, Artificial Sequence
  Description of Artificial Sequence: Synthetic oligonucleotide
  Target: LAMA2; (+) strand; PAM type: YTN; PAM sequence: TTT
cctacaaagttgcttacttt

SEQ ID NO: 404731 - DNA, 20 bp, Artificial Sequence
  Description of Artificial Sequence: Synthetic oligonucleotide
  Target: LAMA2; (+) strand; PAM type: YTN; PAM sequence: TTC
ctacaaagttgcttactttt

SEQ ID NO: 404732 - DNA, 20 bp, Artificial Sequence
  Description of Artificial Sequence: Synthetic oligonucleotide
  Target: LAMA2; (+) strand; PAM type: YTN; PAM sequence: CTA
caaagttgcttactttttct

SEQ ID NO: 404733 - DNA, 20 bp, Artificial Sequence
  Description of Artificial Sequence: Synthetic oligonucleotide
  Target: LAMA2; (+) strand; PAM type: YTN; PAM sequence: TTG
cttactttttctttattccc

SEQ ID NO: 404734 - DNA, 20 bp, Artificial Sequence
  Description of Artificial Sequence: Synthetic oligonucleotide
  Target: LAMA2; (+) strand; PAM type: YTN; PAM sequence: CTT
actttttctttattcccttg

SEQ ID NO: 404735 - DNA, 20 bp, Artificial Sequence
  Description of Artificial Sequence: Synthetic oligonucleotide
  Target: LAMA2; (+) strand; PAM type: YTN; PAM sequence: TTA
ctttttctttattcccttga

SEQ ID NO: 404736 - DNA, 20 bp, Artificial Sequence
  Description of Artificial Sequence: Synthetic oligonucleotide
  Target: LAMA2; (+) strand; PAM type: YTN; PAM sequence: CTT
tttctttattcccttgaact

SEQ ID NO: 404737 - DNA, 20 bp, Artificial Sequence
  Description of Artificial Sequence: Synthetic oligonucleotide
  Target: LAMA2; (+) strand; PAM type: YTN; PAM sequence: TTT
ttctttattcccttgaactc

SEQ ID NO: 404738 - DNA, 20 bp, Artificial Sequence
  Description of Artificial Sequence: Synthetic oligonucleotide
  Target: LAMA2; (+) strand; PAM type: YTN; PAM sequence: TTT
tctttattcccttgaactcg

SEQ ID NO: 404739 - DNA, 20 bp, Artificial Sequence
  Description of Artificial Sequence: Synthetic oligonucleotide
  Target: LAMA2; (+) strand; PAM type: YTN; PAM sequence: TTT
ctttattcccttgaactcga

SEQ ID NO: 404740 - DNA, 20 bp, Artificial Sequence
  Description of Artificial Sequence: Synthetic oligonucleotide
  Target: LAMA2; (+) strand; PAM type: YTN; PAM sequence: TTC
tttattcccttgaactcgaa

SEQ ID NO: 404741 - DNA, 20 bp, Artificial Sequence
  Description of Artificial Sequence: Synthetic oligonucleotide
  Target: LAMA2; (+) strand; PAM type: YTN; PAM sequence: CTT
tattcccttgaactcgaaat

SEQ ID NO: 404742 - DNA, 20 bp, Artificial Sequence
  Description of Artificial Sequence: Synthetic oligonucleotide
  Target: LAMA2; (+) strand; PAM type: YTN; PAM sequence: TTT
attcccttgaactcgaaatc

SEQ ID NO: 404743 - DNA, 20 bp, Artificial Sequence
  Description of Artificial Sequence: Synthetic oligonucleotide
  Target: LAMA2; (+) strand; PAM type: YTN; PAM sequence: TTA
ttcccttgaactcgaaatct

SEQ ID NO: 404744 - DNA, 20 bp, Artificial Sequence
  Description of Artificial Sequence: Synthetic oligonucleotide
  Target: LAMA2; (+) strand; PAM type: YTN; PAM sequence: TTC
ccttgaactcgaaatcttct

SEQ ID NO: 404745 - DNA, 20 bp, Artificial Sequence
  Description of Artificial Sequence: Synthetic oligonucleotide
  Target: LAMA2; (+) strand; PAM type: YTN; PAM sequence: CTT
gaactcgaaatcttcttggc

SEQ ID NO: 404746 - DNA, 20 bp, Artificial Sequence
  Description of Artificial Sequence: Synthetic oligonucleotide
  Target: LAMA2; (+) strand; PAM type: YTN; PAM sequence: TTG
aactcgaaatcttcttggct

SEQ ID NO: 404747 - DNA, 20 bp, Artificial Sequence
  Description of Artificial Sequence: Synthetic oligonucleotide
  Target: LAMA2; (+) strand; PAM type: YTN; PAM sequence: CTC
gaaatcttcttggctgtgaa

SEQ ID NO: 404748 - DNA, 20 bp, Artificial Sequence
  Description of Artificial Sequence: Synthetic oligonucleotide
  Target: LAMA2; (+) strand; PAM type: YTN; PAM sequence: CTT
cttggctgtgaacagaaatt

SEQ ID NO: 404749 - DNA, 20 bp, Artificial Sequence
  Description of Artificial Sequence: Synthetic oligonucleotide
  Target: LAMA2; (+) strand; PAM type: YTN; PAM sequence: TTC
ttggctgtgaacagaaattt

SEQ ID NO: 404750 - DNA, 20 bp, Artificial Sequence
  Description of Artificial Sequence: Synthetic oligonucleotide
  Target: LAMA2; (+) strand; PAM type: YTN; PAM sequence: CTT
ggctgtgaacagaaatttaa

SEQ ID NO: 404751 - DNA, 20 bp, Artificial Sequence
  Description of Artificial Sequence: Synthetic oligonucleotide
  Target: LAMA2; (+) strand; PAM type: YTN; PAM sequence: TTG
gctgtgaacagaaatttaaa

SEQ ID NO: 404752 - DNA, 20 bp, Artificial Sequence
  Description of Artificial Sequence: Synthetic oligonucleotide
  Target: LAMA2; (+) strand; PAM type: YTN; PAM sequence: CTG
tgaacagaaatttaaaaatt

SEQ ID NO: 404753 - DNA, 20 bp, Artificial Sequence
  Description of Artificial Sequence: Synthetic oligonucleotide
  Target: LAMA2; (+) strand; PAM type: YTN; PAM sequence: TTT
aaaaatttacagcagcacta

SEQ ID NO: 404754 - DNA, 20 bp, Artificial Sequence
  Description of Artificial Sequence: Synthetic oligonucleotide
  Target: LAMA2; (+) strand; PAM type: YTN; PAM sequence: TTA
aaaatttacagcagcactac

SEQ ID NO: 404755 - DNA, 20 bp, Artificial Sequence
  Description of Artificial Sequence: Synthetic oligonucleotide
  Target: LAMA2; (+) strand; PAM type: YTN; PAM sequence: TTT
acagcagcactaccatagag

SEQ ID NO: 404756 - DNA, 20 bp, Artificial Sequence
  Description of Artificial Sequence: Synthetic oligonucleotide
  Target: LAMA2; (+) strand; PAM type: YTN; PAM sequence: TTA
cagcagcactaccatagagt

SEQ ID NO: 404757 - DNA, 20 bp, Artificial Sequence
  Description of Artificial Sequence: Synthetic oligonucleotide
  Target: LAMA2; (+) strand; PAM type: YTN; PAM sequence: CTA
ccatagagtgatttatacaa

SEQ ID NO: 404758 - DNA, 20 bp, Artificial Sequence
  Description of Artificial Sequence: Synthetic oligonucleotide
  Target: LAMA2; (+) strand; PAM type: YTN; PAM sequence: TTT
atacaagtgcttttaaaaaa

SEQ ID NO: 404759 - DNA, 20 bp, Artificial Sequence
  Description of Artificial Sequence: Synthetic oligonucleotide
  Target: LAMA2; (+) strand; PAM type: YTN; PAM sequence: TTA
tacaagtgcttttaaaaaat

SEQ ID NO: 404760 - DNA, 20 bp, Artificial Sequence
  Description of Artificial Sequence: Synthetic oligonucleotide
  Target: LAMA2; (+) strand; PAM type: YTN; PAM sequence: CTT
ttaaaaaatctcttctatgt

SEQ ID NO: 404761 - DNA, 20 bp, Artificial Sequence
  Description of Artificial Sequence: Synthetic oligonucleotide
  Target: LAMA2; (+) strand; PAM type: YTN; PAM sequence: TTT
taaaaaatctcttctatgtc

SEQ ID NO: 404762 - DNA, 20 bp, Artificial Sequence
  Description of Artificial Sequence: Synthetic oligonucleotide
  Target: LAMA2; (+) strand; PAM type: YTN; PAM sequence: TTT
aaaaaatctcttctatgtca

SEQ ID NO: 404763 - DNA, 20 bp, Artificial Sequence
  Description of Artificial Sequence: Synthetic oligonucleotide
  Target: LAMA2; (+) strand; PAM type: YTN; PAM sequence: TTA
aaaaatctcttctatgtcat

SEQ ID NO: 404764 - DNA, 20 bp, Artificial Sequence
  Description of Artificial Sequence: Synthetic oligonucleotide
  Target: LAMA2; (+) strand; PAM type: YTN; PAM sequence: CTC
ttctatgtcatcagcatgtc

SEQ ID NO: 404765 - DNA, 20 bp, Artificial Sequence
  Description of Artificial Sequence: Synthetic oligonucleotide
  Target: LAMA2; (+) strand; PAM type: YTN; PAM sequence: CTT
ctatgtcatcagcatgtccc

SEQ ID NO: 404766 - DNA, 20 bp, Artificial Sequence
  Description of Artificial Sequence: Synthetic oligonucleotide
  Target: LAMA2; (+) strand; PAM type: YTN; PAM sequence: TTC
tatgtcatcagcatgtcccc

SEQ ID NO: 404767 - DNA, 20 bp, Artificial Sequence
  Description of Artificial Sequence: Synthetic oligonucleotide
  Target: LAMA2; (+) strand; PAM type: YTN; PAM sequence: CTA
tgtcatcagcatgtcccctt

SEQ ID NO: 404768 - DNA, 20 bp, Artificial Sequence
  Description of Artificial Sequence: Synthetic oligonucleotide
  Target: LAMA2; (+) strand; PAM type: YTN; PAM sequence: CTT
tcttctgatctcaggggaaa

SEQ ID NO: 404769 - DNA, 20 bp, Artificial Sequence
  Description of Artificial Sequence: Synthetic oligonucleotide
  Target: LAMA2; (+) strand; PAM type: YTN; PAM sequence: TTT
cttctgatctcaggggaaaa

SEQ ID NO: 404770 - DNA, 20 bp, Artificial Sequence
  Description of Artificial Sequence: Synthetic oligonucleotide
  Target: LAMA2; (+) strand; PAM type: YTN; PAM sequence: TTC
ttctgatctcaggggaaaaa

SEQ ID NO: 404771 - DNA, 20 bp, Artificial Sequence
  Description of Artificial Sequence: Synthetic oligonucleotide
  Target: LAMA2; (+) strand; PAM type: YTN; PAM sequence: CTT
ctgatctcaggggaaaaagc

SEQ ID NO: 404772 - DNA, 20 bp, Artificial Sequence
  Description of Artificial Sequence: Synthetic oligonucleotide
  Target: LAMA2; (+) strand; PAM type: YTN; PAM sequence: TTC
tgatctcaggggaaaaagct

SEQ ID NO: 404773 - DNA, 20 bp, Artificial Sequence
  Description of Artificial Sequence: Synthetic oligonucleotide
  Target: LAMA2; (+) strand; PAM type: YTN; PAM sequence: CTG
atctcaggggaaaaagcttt

SEQ ID NO: 404774 - DNA, 20 bp, Artificial Sequence
  Description of Artificial Sequence: Synthetic oligonucleotide
  Target: LAMA2; (+) strand; PAM type: YTN; PAM sequence: CTC
aggggaaaaagctttgtgta

SEQ ID NO: 404775 - DNA, 20 bp, Artificial Sequence
  Description of Artificial Sequence: Synthetic oligonucleotide
  Target: LAMA2; (+) strand; PAM type: YTN; PAM sequence: CTT
tgtgtatgcatggcccaaat

SEQ ID NO: 404776 - DNA, 20 bp, Artificial Sequence
  Description of Artificial Sequence: Synthetic oligonucleotide
  Target: LAMA2; (+) strand; PAM type: YTN; PAM sequence: TTT
gtgtatgcatggcccaaatt

SEQ ID NO: 404777 - DNA, 20 bp, Artificial Sequence
  Description of Artificial Sequence: Synthetic oligonucleotide
  Target: LAMA2; (+) strand; PAM type: YTN; PAM sequence: TTG
tgtatgcatggcccaaattt

SEQ ID NO: 404778 - DNA, 20 bp, Artificial Sequence
  Description of Artificial Sequence: Synthetic oligonucleotide
  Target: LAMA2; (+) strand; PAM type: YTN; PAM sequence: TTT
gcccaaagaaaattatgtag

SEQ ID NO: 404779 - DNA, 20 bp, Artificial Sequence
  Description of Artificial Sequence: Synthetic oligonucleotide
  Target: LAMA2; (+) strand; PAM type: YTN; PAM sequence: TTG
cccaaagaaaattatgtagg

SEQ ID NO: 404780 - DNA, 20 bp, Artificial Sequence
  Description of Artificial Sequence: Synthetic oligonucleotide
  Target: LAMA2; (+) strand; PAM type: YTN; PAM sequence: TTA
tgtaggagcactagcattta

SEQ ID NO: 404781 - DNA, 20 bp, Artificial Sequence
  Description of Artificial Sequence: Synthetic oligonucleotide
  Target: LAMA2; (+) strand; PAM type: YTN; PAM sequence: CTA
gcatttattgaacaccttct

SEQ ID NO: 404782 - DNA, 20 bp, Artificial Sequence
  Description of Artificial Sequence: Synthetic oligonucleotide
  Target: LAMA2; (+) strand; PAM type: YTN; PAM sequence: TTT
attgaacaccttctgtatat

SEQ ID NO: 404783 - DNA, 20 bp, Artificial Sequence
  Description of Artificial Sequence: Synthetic oligonucleotide
  Target: LAMA2; (+) strand; PAM type: YTN; PAM sequence: TTA
ttgaacaccttctgtatatc

SEQ ID NO: 404784 - DNA, 20 bp, Artificial Sequence
  Description of Artificial Sequence: Synthetic oligonucleotide
  Target: LAMA2; (+) strand; PAM type: YTN; PAM sequence: TTG
aacaccttctgtatatcagg

SEQ ID NO: 404785 - DNA, 20 bp, Artificial Sequence
  Description of Artificial Sequence: Synthetic oligonucleotide
  Target: LAMA2; (+) strand; PAM type: YTN; PAM sequence: CTT
ctgtatatcaggcactgaga

SEQ ID NO: 404786 - DNA, 20 bp, Artificial Sequence
  Description of Artificial Sequence: Synthetic oligonucleotide
  Target: LAMA2; (+) strand; PAM type: YTN; PAM sequence: TTC
tgtatatcaggcactgagat

SEQ ID NO: 404787 - DNA, 20 bp, Artificial Sequence
  Description of Artificial Sequence: Synthetic oligonucleotide
  Target: LAMA2; (+) strand; PAM type: YTN; PAM sequence: CTG
tatatcaggcactgagattg

SEQ ID NO: 404788 - DNA, 20 bp, Artificial Sequence
  Description of Artificial Sequence: Synthetic oligonucleotide
  Target: LAMA2; (+) strand; PAM type: YTN; PAM sequence: CTG
agattggtgtcataaataaa

SEQ ID NO: 404789 - DNA, 20 bp, Artificial Sequence
  Description of Artificial Sequence: Synthetic oligonucleotide
  Target: LAMA2; (+) strand; PAM type: YTN; PAM sequence: TTG
gtgtcataaataaattatct

SEQ ID NO: 404790 - DNA, 20 bp, Artificial Sequence
  Description of Artificial Sequence: Synthetic oligonucleotide
  Target: LAMA2; (+) strand; PAM type: YTN; PAM sequence: TTA
tctaactttattctcacaaa

SEQ ID NO: 404791 - DNA, 20 bp, Artificial Sequence
  Description of Artificial Sequence: Synthetic oligonucleotide
  Target: LAMA2; (+) strand; PAM type: YTN; PAM sequence: CTA
actttattctcacaaaaatt

SEQ ID NO: 404792 - DNA, 20 bp, Artificial Sequence
  Description of Artificial Sequence: Synthetic oligonucleotide
  Target: LAMA2; (+) strand; PAM type: YTN; PAM sequence: CTT
tattctcacaaaaattccac

SEQ ID NO: 404793 - DNA, 20 bp, Artificial Sequence
  Description of Artificial Sequence: Synthetic oligonucleotide
  Target: LAMA2; (+) strand; PAM type: YTN; PAM sequence: TTT
attctcacaaaaattccaca

SEQ ID NO: 404794 - DNA, 20 bp, Artificial Sequence
  Description of Artificial Sequence: Synthetic oligonucleotide
  Target: LAMA2; (+) strand; PAM type: YTN; PAM sequence: TTA
ttctcacaaaaattccacat

SEQ ID NO: 404795 - DNA, 20 bp, Artificial Sequence
  Description of Artificial Sequence: Synthetic oligonucleotide
  Target: LAMA2; (+) strand; PAM type: YTN; PAM sequence: TTC
tcacaaaaattccacattac

SEQ ID NO: 404796 - DNA, 20 bp, Artificial Sequence
  Description of Artificial Sequence: Synthetic oligonucleotide
  Target: LAMA2; (+) strand; PAM type: YTN; PAM sequence: CTC
acaaaaattccacattacag

SEQ ID NO: 404797 - DNA, 20 bp, Artificial Sequence
  Description of Artificial Sequence: Synthetic oligonucleotide
  Target: LAMA2; (+) strand; PAM type: YTN; PAM sequence: TTC
cacattacagacaaaagaat

SEQ ID NO: 404798 - DNA, 20 bp, Artificial Sequence
  Description of Artificial Sequence: Synthetic oligonucleotide
  Target: LAMA2; (+) strand; PAM type: YTN; PAM sequence: TTA
cagacaaaagaatagaattg

SEQ ID NO: 404799 - DNA, 20 bp, Artificial Sequence
  Description of Artificial Sequence: Synthetic oligonucleotide
  Target: LAMA2; (+) strand; PAM type: YTN; PAM sequence: TTG
tggagaaggtcagcagctca

SEQ ID NO: 404800 - DNA, 20 bp, Artificial Sequence
  Description of Artificial Sequence: Synthetic oligonucleotide
  Target: LAMA2; (+) strand; PAM type: YTN; PAM sequence: CTC
acctaaagttagaagctagg

SEQ ID NO: 404801 - DNA, 20 bp, Artificial Sequence
  Description of Artificial Sequence: Synthetic oligonucleotide
  Target: LAMA2; (+) strand; PAM type: YTN; PAM sequence: CTA
aagttagaagctaggaagtg

SEQ ID NO: 404802 - DNA, 20 bp, Artificial Sequence
  Description of Artificial Sequence: Synthetic oligonucleotide
  Target: LAMA2; (+) strand; PAM type: YTN; PAM sequence: TTA
gaagctaggaagtgtttatt

SEQ ID NO: 404803 - DNA, 20 bp, Artificial Sequence
  Description of Artificial Sequence: Synthetic oligonucleotide
  Target: LAMA2; (+) strand; PAM type: YTN; PAM sequence: CTA
ggaagtgtttatttactgat

SEQ ID NO: 404804 - DNA, 20 bp, Artificial Sequence
  Description of Artificial Sequence: Synthetic oligonucleotide
  Target: LAMA2; (+) strand; PAM type: YTN; PAM sequence: TTT
atttactgatgatgaaaact

SEQ ID NO: 404805 - DNA, 20 bp, Artificial Sequence
  Description of Artificial Sequence: Synthetic oligonucleotide
  Target: LAMA2; (+) strand; PAM type: YTN; PAM sequence: TTA
tttactgatgatgaaaactg

SEQ ID NO: 404806 - DNA, 20 bp, Artificial Sequence
  Description of Artificial Sequence: Synthetic oligonucleotide
  Target: LAMA2; (+) strand; PAM type: YTN; PAM sequence: TTT
actgatgatgaaaactggta

SEQ ID NO: 404807 - DNA, 20 bp, Artificial Sequence
  Description of Artificial Sequence: Synthetic oligonucleotide
  Target: LAMA2; (+) strand; PAM type: YTN; PAM sequence: TTA
ctgatgatgaaaactggtat

SEQ ID NO: 404808 - DNA, 20 bp, Artificial Sequence
  Description of Artificial Sequence: Synthetic oligonucleotide
  Target: LAMA2; (+) strand; PAM type: YTN; PAM sequence: CTG
atgatgaaaactggtatagc

SEQ ID NO: 404809 - DNA, 20 bp, Artificial Sequence
  Description of Artificial Sequence: Synthetic oligonucleotide
  Target: LAMA2; (+) strand; PAM type: YTN; PAM sequence: CTG
gtatagcaaaaagtaatcag

SEQ ID NO: 404810 - DNA, 20 bp, Artificial Sequence
  Description of Artificial Sequence: Synthetic oligonucleotide
  Target: LAMA2; (+) strand; PAM type: YTN; PAM sequence: TTC
gtggattaaatagttgagct

SEQ ID NO: 404811 - DNA, 20 bp, Artificial Sequence
  Description of Artificial Sequence: Synthetic oligonucleotide
  Target: LAMA2; (+) strand; PAM type: YTN; PAM sequence: TTA
aatagttgagcttttcccct

SEQ ID NO: 404812 - DNA, 20 bp, Artificial Sequence
  Description of Artificial Sequence: Synthetic oligonucleotide
  Target: LAMA2; (+) strand; PAM type: YTN; PAM sequence: TTG
agcttttcccctgttgttga

SEQ ID NO: 404813 - DNA, 20 bp, Artificial Sequence
  Description of Artificial Sequence: Synthetic oligonucleotide
  Target: LAMA2; (+) strand; PAM type: YTN; PAM sequence: CTT
ttcccctgttgttgactcat

SEQ ID NO: 404814 - DNA, 20 bp, Artificial Sequence
  Description of Artificial Sequence: Synthetic oligonucleotide
  Target: LAMA2; (+) strand; PAM type: YTN; PAM sequence: TTT
tcccctgttgttgactcatc

SEQ ID NO: 404815 - DNA, 20 bp, Artificial Sequence
  Description of Artificial Sequence: Synthetic oligonucleotide
  Target: LAMA2; (+) strand; PAM type: YTN; PAM sequence: TTT
cccctgttgttgactcatcc

SEQ ID NO: 404816 - DNA, 20 bp, Artificial Sequence
  Description of Artificial Sequence: Synthetic oligonucleotide
  Target: LAMA2; (+) strand; PAM type: YTN; PAM sequence: TTC
ccctgttgttgactcatcct

SEQ ID NO: 404817 - DNA, 20 bp, Artificial Sequence
  Description of Artificial Sequence: Synthetic oligonucleotide
  Target: LAMA2; (+) strand; PAM type: YTN; PAM sequence: CTG
ttgttgactcatcctgtagt

SEQ ID NO: 404818 - DNA, 20 bp, Artificial Sequence
  Description of Artificial Sequence: Synthetic oligonucleotide
  Target: LAMA2; (+) strand; PAM type: YTN; PAM sequence: TTG
ttgactcatcctgtagtagc

SEQ ID NO: 404819 - DNA, 20 bp, Artificial Sequence
  Description of Artificial Sequence: Synthetic oligonucleotide
  Target: LAMA2; (+) strand; PAM type: YTN; PAM sequence: TTG
actcatcctgtagtagctct

SEQ ID NO: 404820 - DNA, 20 bp, Artificial Sequence
  Description of Artificial Sequence: Synthetic oligonucleotide
  Target: LAMA2; (+) strand; PAM type: YTN; PAM sequence: CTC
atcctgtagtagctctaagg

SEQ ID NO: 404821 - DNA, 20 bp, Artificial Sequence
  Description of Artificial Sequence: Synthetic oligonucleotide
  Target: LAMA2; (+) strand; PAM type: YTN; PAM sequence: CTG
tagtagctctaaggatacgg

SEQ ID NO: 404822 - DNA, 20 bp, Artificial Sequence
  Description of Artificial Sequence: Synthetic oligonucleotide
  Target: LAMA2; (+) strand; PAM type: YTN; PAM sequence: CTC
taaggatacggacagactat

SEQ ID NO: 404823 - DNA, 20 bp, Artificial Sequence
  Description of Artificial Sequence: Synthetic oligonucleotide
  Target: LAMA2; (+) strand; PAM type: YTN; PAM sequence: CTA
aggatacggacagactatga

SEQ ID NO: 404824 - DNA, 20 bp, Artificial Sequence
  Description of Artificial Sequence: Synthetic oligonucleotide
  Target: LAMA2; (+) strand; PAM type: YTN; PAM sequence: CTA
tgatgaaaagatgaatatgt

SEQ ID NO: 404825 - DNA, 20 bp, Artificial Sequence
  Description of Artificial Sequence: Synthetic oligonucleotide
  Target: LAMA2; (+) strand; PAM type: YTN; PAM sequence: CTT
tagtttctgctgataataac

SEQ ID NO: 404826 - DNA, 20 bp, Artificial Sequence
  Description of Artificial Sequence: Synthetic oligonucleotide
  Target: LAMA2; (+) strand; PAM type: YTN; PAM sequence: TTT
agtttctgctgataataact

SEQ ID NO: 404827 - DNA, 20 bp, Artificial Sequence
  Description of Artificial Sequence: Synthetic oligonucleotide
  Target: LAMA2; (+) strand; PAM type: YTN; PAM sequence: TTA
gtttctgctgataataactc

SEQ ID NO: 404828 - DNA, 20 bp, Artificial Sequence
  Description of Artificial Sequence: Synthetic oligonucleotide
  Target: LAMA2; (+) strand; PAM type: YTN; PAM sequence: TTT
ctgctgataataactctcat

SEQ ID NO: 404829 - DNA, 20 bp, Artificial Sequence
  Description of Artificial Sequence: Synthetic oligonucleotide
  Target: LAMA2; (+) strand; PAM type: YTN; PAM sequence: TTC
tgctgataataactctcatg

SEQ ID NO: 404830 - DNA, 20 bp, Artificial Sequence
  Description of Artificial Sequence: Synthetic oligonucleotide
  Target: LAMA2; (+) strand; PAM type: YTN; PAM sequence: CTG
ctgataataactctcatgga

SEQ ID NO: 404831 - DNA, 20 bp, Artificial Sequence
  Description of Artificial Sequence: Synthetic oligonucleotide
  Target: LAMA2; (+) strand; PAM type: YTN; PAM sequence: CTG
ataataactctcatggataa

SEQ ID NO: 404832 - DNA, 20 bp, Artificial Sequence
  Description of Artificial Sequence: Synthetic oligonucleotide
  Target: LAMA2; (+) strand; PAM type: YTN; PAM sequence: CTC
tcatggataaaccaagatta

SEQ ID NO: 404833 - DNA, 20 bp, Artificial Sequence
  Description of Artificial Sequence: Synthetic oligonucleotide
  Target: LAMA2; (+) strand; PAM type: YTN; PAM sequence: CTC
atggataaaccaagattatt

SEQ ID NO: 404834 - DNA, 20 bp, Artificial Sequence
  Description of Artificial Sequence: Synthetic oligonucleotide
  Target: LAMA2; (+) strand; PAM type: YTN; PAM sequence: TTA
tttgtgaaattccaaattct

SEQ ID NO: 404835 - DNA, 20 bp, Artificial Sequence
  Description of Artificial Sequence: Synthetic oligonucleotide
  Target: LAMA2; (+) strand; PAM type: YTN; PAM sequence: TTT
gtgaaattccaaattctagc

SEQ ID NO: 404836 - DNA, 20 bp, Artificial Sequence
  Description of Artificial Sequence: Synthetic oligonucleotide
  Target: LAMA2; (+) strand; PAM type: YTN; PAM sequence: TTG
tgaaattccaaattctagca

SEQ ID NO: 404837 - DNA, 20 bp, Artificial Sequence
  Description of Artificial Sequence: Synthetic oligonucleotide
  Target: LAMA2; (+) strand; PAM type: YTN; PAM sequence: TTC
caaattctagcaaataacgg

SEQ ID NO: 404838 - DNA, 20 bp, Artificial Sequence
  Description of Artificial Sequence: Synthetic oligonucleotide
  Target: LAMA2; (+) strand; PAM type: YTN; PAM sequence: TTC
tagcaaataacggtatttct

SEQ ID NO: 404839 - DNA, 20 bp, Artificial Sequence
  Description of Artificial Sequence: Synthetic oligonucleotide
  Target: LAMA2; (+) strand; PAM type: YTN; PAM sequence: CTA
gcaaataacggtatttcttt

SEQ ID NO: 404840 - DNA, 20 bp, Artificial Sequence
  Description of Artificial Sequence: Synthetic oligonucleotide
  Target: LAMA2; (+) strand; PAM type: YTN; PAM sequence: TTT
ctttctgcagaaggctgatg

SEQ ID NO: 404841 - DNA, 20 bp, Artificial Sequence
  Description of Artificial Sequence: Synthetic oligonucleotide
  Target: LAMA2; (+) strand; PAM type: YTN; PAM sequence: TTC
tttctgcagaaggctgatgc

SEQ ID NO: 404842 - DNA, 20 bp, Artificial Sequence
  Description of Artificial Sequence: Synthetic oligonucleotide
  Target: LAMA2; (+) strand; PAM type: YTN; PAM sequence: CTT
tctgcagaaggctgatgctg

SEQ ID NO: 404843 - DNA, 20 bp, Artificial Sequence
  Description of Artificial Sequence: Synthetic oligonucleotide
  Target: LAMA2; (+) strand; PAM type: YTN; PAM sequence: TTT
ctgcagaaggctgatgctgt

SEQ ID NO: 404844 - DNA, 20 bp, Artificial Sequence
  Description of Artificial Sequence: Synthetic oligonucleotide
  Target: LAMA2; (+) strand; PAM type: YTN; PAM sequence: TTC
tgcagaaggctgatgctgta

SEQ ID NO: 404845 - DNA, 20 bp, Artificial Sequence
  Description of Artificial Sequence: Synthetic oligonucleotide
  Target: LAMA2; (+) strand; PAM type: YTN; PAM sequence: CTG
cagaaggctgatgctgtacg

SEQ ID NO: 404846 - DNA, 20 bp, Artificial Sequence
  Description of Artificial Sequence: Synthetic oligonucleotide
  Target: LAMA2; (+) strand; PAM type: YTN; PAM sequence: CTG
atgctgtacgtgtgattaca

SEQ ID NO: 404847 - DNA, 20 bp, Artificial Sequence
  Description of Artificial Sequence: Synthetic oligonucleotide
  Target: LAMA2; (+) strand; PAM type: YTN; PAM sequence: CTG
tacgtgtgattacattcact

SEQ ID NO: 404848 - DNA, 20 bp, Artificial Sequence
  Description of Artificial Sequence: Synthetic oligonucleotide
  Target: LAMA2; (+) strand; PAM type: YTN; PAM sequence: TTA
cattcactggctgcatggga

SEQ ID NO: 404849 - DNA, 20 bp, Artificial Sequence
  Description of Artificial Sequence: Synthetic oligonucleotide
  Target: LAMA2; (+) strand; PAM type: YTN; PAM sequence: TTC
actggctgcatgggagaaac

SEQ ID NO: 404850 - DNA, 20 bp, Artificial Sequence
  Description of Artificial Sequence: Synthetic oligonucleotide
  Target: LAMA2; (+) strand; PAM type: YTN; PAM sequence: CTG
gctgcatgggagaaacatac

SEQ ID NO: 404851 - DNA, 20 bp, Artificial Sequence
  Description of Artificial Sequence: Synthetic oligonucleotide
  Target: LAMA2; (+) strand; PAM type: YTN; PAM sequence: CTG
catgggagaaacatactttg

SEQ ID NO: 404852 - DNA, 20 bp, Artificial Sequence
  Description of Artificial Sequence: Synthetic oligonucleotide
  Target: LAMA2; (+) strand; PAM type: YTN; PAM sequence: CTT
tgacaacaaacctataggtt

SEQ ID NO: 404853 - DNA, 20 bp, Artificial Sequence
  Description of Artificial Sequence: Synthetic oligonucleotide
  Target: LAMA2; (+) strand; PAM type: YTN; PAM sequence: TTT
gacaacaaacctataggttt

SEQ ID NO: 404854 - DNA, 20 bp, Artificial Sequence
  Description of Artificial Sequence: Synthetic oligonucleotide
  Target: LAMA2; (+) strand; PAM type: YTN; PAM sequence: TTG
acaacaaacctataggtttg

SEQ ID NO: 404855 - DNA, 20 bp, Artificial Sequence
  Description of Artificial Sequence: Synthetic oligonucleotide
  Target: LAMA2; (+) strand; PAM type: YTN; PAM sequence: CTA
taggtttgtggaatttccga

SEQ ID NO: 404856 - DNA, 20 bp, Artificial Sequence
  Description of Artificial Sequence: Synthetic oligonucleotide
  Target: LAMA2; (+) strand; PAM type: YTN; PAM sequence: TTT
gtggaatttccgagaaaaag

SEQ ID NO: 404857 - DNA, 20 bp, Artificial Sequence
  Description of Artificial Sequence: Synthetic oligonucleotide
  Target: LAMA2; (+) strand; PAM type: YTN; PAM sequence: TTG
tggaatttccgagaaaaaga

SEQ ID NO: 404858 - DNA, 20 bp, Artificial Sequence
  Description of Artificial Sequence: Synthetic oligonucleotide
  Target: LAMA2; (+) strand; PAM type: YTN; PAM sequence: TTT
ccgagaaaaagaaggtgact

SEQ ID NO: 404859 - DNA, 20 bp, Artificial Sequence
  Description of Artificial Sequence: Synthetic oligonucleotide
  Target: LAMA2; (+) strand; PAM type: YTN; PAM sequence: TTC
cgagaaaaagaaggtgactg

SEQ ID NO: 404860 - DNA, 20 bp, Artificial Sequence
  Description of Artificial Sequence: Synthetic oligonucleotide
  Target: LAMA2; (+) strand; PAM type: YTN; PAM sequence: CTG
caaaggatgcactgtcaggt

SEQ ID NO: 404861 - DNA, 20 bp, Artificial Sequence
  Description of Artificial Sequence: Synthetic oligonucleotide
  Target: LAMA2; (+) strand; PAM type: YTN; PAM sequence: CTG
tcaggttagttgagatgaga

SEQ ID NO: 404862 - DNA, 20 bp, Artificial Sequence
  Description of Artificial Sequence: Synthetic oligonucleotide
  Target: LAMA2; (+) strand; PAM type: YTN; PAM sequence: TTA
gttgagatgagaactctccc

SEQ ID NO: 404863 - DNA, 20 bp, Artificial Sequence
  Description of Artificial Sequence: Synthetic oligonucleotide
  Target: LAMA2; (+) strand; PAM type: YTN; PAM sequence: TTG
agatgagaactctcccaggg

SEQ ID NO: 404864 - DNA, 20 bp, Artificial Sequence
  Description of Artificial Sequence: Synthetic oligonucleotide
  Target: LAMA2; (+) strand; PAM type: YTN; PAM sequence: CTC
tcccagggtctgtcctgtgc

SEQ ID NO: 404865 - DNA, 20 bp, Artificial Sequence
  Description of Artificial Sequence: Synthetic oligonucleotide
  Target: LAMA2; (+) strand; PAM type: YTN; PAM sequence: CTC
ccagggtctgtcctgtgcat

SEQ ID NO: 404866 - DNA, 20 bp, Artificial Sequence
  Description of Artificial Sequence: Synthetic oligonucleotide
  Target: LAMA2; (+) strand; PAM type: YTN; PAM sequence: CTG
tcctgtgcataataaaagct

SEQ ID NO: 404867 - DNA, 20 bp, Artificial Sequence
  Description of Artificial Sequence: Synthetic oligonucleotide
  Target: LAMA2; (+) strand; PAM type: YTN; PAM sequence: CTG
tgcataataaaagcttcgat

SEQ ID NO: 404868 - DNA, 20 bp, Artificial Sequence
  Description of Artificial Sequence: Synthetic oligonucleotide
  Target: LAMA2; (+) strand; PAM type: YTN; PAM sequence: CTT
cgattttattgcataatatt

SEQ ID NO: 404869 - DNA, 20 bp, Artificial Sequence
  Description of Artificial Sequence: Synthetic oligonucleotide
  Target: LAMA2; (+) strand; PAM type: YTN; PAM sequence: TTC
gattttattgcataatattc

SEQ ID NO: 404870 - DNA, 20 bp, Artificial Sequence
  Description of Artificial Sequence: Synthetic oligonucleotide
  Target: LAMA2; (+) strand; PAM type: YTN; PAM sequence: TTT
tattgcataatattctatta

SEQ ID NO: 404871 - DNA, 20 bp, Artificial Sequence
  Description of Artificial Sequence: Synthetic oligonucleotide
  Target: LAMA2; (+) strand; PAM type: YTN; PAM sequence: TTT
attgcataatattctattat

SEQ ID NO: 404872 - DNA, 20 bp, Artificial Sequence
  Description of Artificial Sequence: Synthetic oligonucleotide
  Target: LAMA2; (+) strand; PAM type: YTN; PAM sequence: TTA
ttgcataatattctattatc

SEQ ID NO: 404873 - DNA, 20 bp, Artificial Sequence
  Description of Artificial Sequence: Synthetic oligonucleotide
  Target: LAMA2; (+) strand; PAM type: YTN; PAM sequence: TTG
cataatattctattatcatg

SEQ ID NO: 404874 - DNA, 20 bp, Artificial Sequence
  Description of Artificial Sequence: Synthetic oligonucleotide
  Target: LAMA2; (+) strand; PAM type: YTN; PAM sequence: TTC
tattatcatgtggatgatgt

SEQ ID NO: 404875 - DNA, 20 bp, Artificial Sequence
  Description of Artificial Sequence: Synthetic oligonucleotide
  Target: LAMA2; (+) strand; PAM type: YTN; PAM sequence: CTA
ttatcatgtggatgatgtgg

SEQ ID NO: 404876 - DNA, 20 bp, Artificial Sequence
  Description of Artificial Sequence: Synthetic oligonucleotide
  Target: LAMA2; (+) strand; PAM type: YTN; PAM sequence: TTA
tcatgtggatgatgtggagc

SEQ ID NO: 404877 - DNA, 20 bp, Artificial Sequence
  Description of Artificial Sequence: Synthetic oligonucleotide
  Target: LAMA2; (+) strand; PAM type: YTN; PAM sequence: TTT
gaaaggattatactcagagg

SEQ ID NO: 404878 - DNA, 20 bp, Artificial Sequence
  Description of Artificial Sequence: Synthetic oligonucleotide
  Target: LAMA2; (+) strand; PAM type: YTN; PAM sequence: TTG
aaaggattatactcagaggt

SEQ ID NO: 404879 - DNA, 20 bp, Artificial Sequence
  Description of Artificial Sequence: Synthetic oligonucleotide
  Target: LAMA2; (+) strand; PAM type: YTN; PAM sequence: TTA
tactcagaggtggaattacc

SEQ ID NO: 404880 - DNA, 20 bp, Artificial Sequence
  Description of Artificial Sequence: Synthetic oligonucleotide
  Target: LAMA2; (+) strand; PAM type: YTN; PAM sequence: CTC
agaggtggaattaccacaaa

SEQ ID NO: 404881 - DNA, 20 bp, Artificial Sequence
  Description of Artificial Sequence: Synthetic oligonucleotide
  Target: LAMA2; (+) strand; PAM type: YTN; PAM sequence: TTA
ccacaaaactaatgaatctt

SEQ ID NO: 404882 - DNA, 20 bp, Artificial Sequence
  Description of Artificial Sequence: Synthetic oligonucleotide
  Target: LAMA2; (+) strand; PAM type: YTN; PAM sequence: CTA
atgaatcttcaagtccctgc

SEQ ID NO: 404883 - DNA, 20 bp, Artificial Sequence
  Description of Artificial Sequence: Synthetic oligonucleotide
  Target: LAMA2; (+) strand; PAM type: YTN; PAM sequence: CTT
caagtccctgcctgcatttg

SEQ ID NO: 404884 - DNA, 20 bp, Artificial Sequence
  Description of Artificial Sequence: Synthetic oligonucleotide
  Target: LAMA2; (+) strand; PAM type: YTN; PAM sequence: TTC
aagtccctgcctgcatttgc

SEQ ID NO: 404885 - DNA, 20 bp, Artificial Sequence
  Description of Artificial Sequence: Synthetic oligonucleotide
  Target: LAMA2; (+) strand; PAM type: YTN; PAM sequence: CTG
cctgcatttgcacaggcatt

SEQ ID NO: 404886 - DNA, 20 bp, Artificial Sequence
  Description of Artificial Sequence: Synthetic oligonucleotide
  Target: LAMA2; (+) strand; PAM type: YTN; PAM sequence: CTG
catttgcacaggcatttttc

SEQ ID NO: 404887 - DNA, 20 bp, Artificial Sequence
  Description of Artificial Sequence: Synthetic oligonucleotide
  Target: LAMA2; (+) strand; PAM type: YTN; PAM sequence: TTT
gcacaggcatttttcaaggc

SEQ ID NO: 404888 - DNA, 20 bp, Artificial Sequence
  Description of Artificial Sequence: Synthetic oligonucleotide
  Target: LAMA2; (+) strand; PAM type: YTN; PAM sequence: TTG
cacaggcatttttcaaggcc

SEQ ID NO: 404889 - DNA, 20 bp, Artificial Sequence
  Description of Artificial Sequence: Synthetic oligonucleotide
  Target: LAMA2; (+) strand; PAM type: YTN; PAM sequence: TTT
ttcaaggccctgggaggtat

SEQ ID NO: 404890 - DNA, 20 bp, Artificial Sequence
  Description of Artificial Sequence: Synthetic oligonucleotide
  Target: LAMA2; (+) strand; PAM type: YTN; PAM sequence: TTT
tcaaggccctgggaggtata

SEQ ID NO: 404891 - DNA, 20 bp, Artificial Sequence
  Description of Artificial Sequence: Synthetic oligonucleotide
  Target: LAMA2; (+) strand; PAM type: YTN; PAM sequence: TTT
caaggccctgggaggtatac

SEQ ID NO: 404892 - DNA, 20 bp, Artificial Sequence
  Description of Artificial Sequence: Synthetic oligonucleotide
  Target: LAMA2; (+) strand; PAM type: YTN; PAM sequence: TTC
aaggccctgggaggtatact

SEQ ID NO: 404893 - DNA, 20 bp, Artificial Sequence
  Description of Artificial Sequence: Synthetic oligonucleotide
  Target: LAMA2; (+) strand; PAM type: YTN; PAM sequence: CTG
ggaggtatactagcagtaca

SEQ ID NO: 404894 - DNA, 20 bp, Artificial Sequence
  Description of Artificial Sequence: Synthetic oligonucleotide
  Target: LAMA2; (+) strand; PAM type: YTN; PAM sequence: CTA
gcagtacatttgcatagtca

SEQ ID NO: 404895 - DNA, 20 bp, Artificial Sequence
  Description of Artificial Sequence: Synthetic oligonucleotide
  Target: LAMA2; (+) strand; PAM type: YTN; PAM sequence: TTT
gcatagtcatatgtttttat

SEQ ID NO: 404896 - DNA, 20 bp, Artificial Sequence
  Description of Artificial Sequence: Synthetic oligonucleotide
  Target: LAMA2; (+) strand; PAM type: YTN; PAM sequence: TTG
catagtcatatgtttttata

SEQ ID NO: 404897 - DNA, 20 bp, Artificial Sequence
  Description of Artificial Sequence: Synthetic oligonucleotide
  Target: LAMA2; (+) strand; PAM type: YTN; PAM sequence: TTT
ttataaaatttgcaaaggta

SEQ ID NO: 404898 - DNA, 20 bp, Artificial Sequence
  Description of Artificial Sequence: Synthetic oligonucleotide
  Target: LAMA2; (+) strand; PAM type: YTN; PAM sequence: TTT
tataaaatttgcaaaggtaa

SEQ ID NO: 404899 - DNA, 20 bp, Artificial Sequence
  Description of Artificial Sequence: Synthetic oligonucleotide
  Target: LAMA2; (+) strand; PAM type: YTN; PAM sequence: TTT
ataaaatttgcaaaggtaag

SEQ ID NO: 404900 - DNA, 20 bp, Artificial Sequence
  Description of Artificial Sequence: Synthetic oligonucleotide
  Target: LAMA2; (+) strand; PAM type: YTN; PAM sequence: TTA
taaaatttgcaaaggtaaga

SEQ ID NO: 404901 - DNA, 20 bp, Artificial Sequence
  Description of Artificial Sequence: Synthetic oligonucleotide
  Target: LAMA2; (+) strand; PAM type: YTN; PAM sequence: TTT
gcaaaggtaagagattttgg

SEQ ID NO: 404902 - DNA, 20 bp, Artificial Sequence
  Description of Artificial Sequence: Synthetic oligonucleotide
  Target: LAMA2; (+) strand; PAM type: YTN; PAM sequence: TTG
caaaggtaagagattttggc

SEQ ID NO: 404903 - DNA, 20 bp, Artificial Sequence
  Description of Artificial Sequence: Synthetic oligonucleotide
  Target: LAMA2; (+) strand; PAM type: YTN; PAM sequence: TTT
tggctacaatcagttaagtt

SEQ ID NO: 404904 - DNA, 20 bp, Artificial Sequence
  Description of Artificial Sequence: Synthetic oligonucleotide
  Target: LAMA2; (+) strand; PAM type: YTN; PAM sequence: TTT
ggctacaatcagttaagttt

SEQ ID NO: 404905 - DNA, 20 bp, Artificial Sequence
  Description of Artificial Sequence: Synthetic oligonucleotide
  Target: LAMA2; (+) strand; PAM type: YTN; PAM sequence: TTG
gctacaatcagttaagtttc

SEQ ID NO: 404906 - DNA, 20 bp, Artificial Sequence
  Description of Artificial Sequence: Synthetic oligonucleotide
  Target: LAMA2; (+) strand; PAM type: YTN; PAM sequence: CTA
caatcagttaagtttccact

SEQ ID NO: 404907 - DNA, 20 bp, Artificial Sequence
  Description of Artificial Sequence: Synthetic oligonucleotide
  Target: LAMA2; (+) strand; PAM type: YTN; PAM sequence: TTA
agtttccactccaatgttct

SEQ ID NO: 404908 - DNA, 20 bp, Artificial Sequence
  Description of Artificial Sequence: Synthetic oligonucleotide
  Target: LAMA2; (+) strand; PAM type: YTN; PAM sequence: TTT
ccactccaatgttctttcat

SEQ ID NO: 404909 - DNA, 20 bp, Artificial Sequence
  Description of Artificial Sequence: Synthetic oligonucleotide
  Target: LAMA2; (+) strand; PAM type: YTN; PAM sequence: TTC
cactccaatgttctttcatg

SEQ ID NO: 404910 - DNA, 20 bp, Artificial Sequence
  Description of Artificial Sequence: Synthetic oligonucleotide
  Target: LAMA2; (+) strand; PAM type: YTN; PAM sequence: CTC
caatgttctttcatgtcgag

SEQ ID NO: 404911 - DNA, 20 bp, Artificial Sequence
  Description of Artificial Sequence: Synthetic oligonucleotide
  Target: LAMA2; (+) strand; PAM type: YTN; PAM sequence: TTC
tttcatgtcgaggggttttt

SEQ ID NO: 404912 - DNA, 20 bp, Artificial Sequence
  Description of Artificial Sequence: Synthetic oligonucleotide
  Target: LAMA2; (+) strand; PAM type: YTN; PAM sequence: CTT
tcatgtcgaggggttttttt

SEQ ID NO: 404913 - DNA, 20 bp, Artificial Sequence
  Description of Artificial Sequence: Synthetic oligonucleotide
  Target: LAMA2; (+) strand; PAM type: YTN; PAM sequence: TTT
catgtcgaggggtttttttg

SEQ ID NO: 404914 - DNA, 20 bp, Artificial Sequence
  Description of Artificial Sequence: Synthetic oligonucleotide
  Target: LAMA2; (+) strand; PAM type: YTN; PAM sequence: TTC
atgtcgaggggtttttttgt

SEQ ID NO: 404915 - DNA, 20 bp, Artificial Sequence
  Description of Artificial Sequence: Synthetic oligonucleotide
  Target: LAMA2; (+) strand; PAM type: YTN; PAM sequence: TTT
ttttgtgtctgtgagtacct

SEQ ID NO: 404916 - DNA, 20 bp, Artificial Sequence
  Description of Artificial Sequence: Synthetic oligonucleotide
  Target: LAMA2; (+) strand; PAM type: YTN; PAM sequence: TTT
tttgtgtctgtgagtacctc

SEQ ID NO: 404917 - DNA, 20 bp, Artificial Sequence
  Description of Artificial Sequence: Synthetic oligonucleotide
  Target: LAMA2; (+) strand; PAM type: YTN; PAM sequence: TTT
ttgtgtctgtgagtacctca

SEQ ID NO: 404918 - DNA, 20 bp, Artificial Sequence
  Description of Artificial Sequence: Synthetic oligonucleotide
  Target: LAMA2; (+) strand; PAM type: YTN; PAM sequence: TTT
tgtgtctgtgagtacctcat

SEQ ID NO: 404919 - DNA, 20 bp, Artificial Sequence
  Description of Artificial Sequence: Synthetic oligonucleotide
  Target: LAMA2; (+) strand; PAM type: YTN; PAM sequence: TTT
gtgtctgtgagtacctcatt

SEQ ID NO: 404920 - DNA, 20 bp, Artificial Sequence
  Description of Artificial Sequence: Synthetic oligonucleotide
  Target: LAMA2; (+) strand; PAM type: YTN; PAM sequence: TTG
tgtctgtgagtacctcattg

SEQ ID NO: 404921 - DNA, 20 bp, Artificial Sequence
  Description of Artificial Sequence: Synthetic oligonucleotide
  Target: LAMA2; (+) strand; PAM type: YTN; PAM sequence: CTG
tgagtacctcattgttataa

SEQ ID NO: 404922 - DNA, 20 bp, Artificial Sequence
  Description of Artificial Sequence: Synthetic oligonucleotide
  Target: LAMA2; (+) strand; PAM type: YTN; PAM sequence: CTC
attgttataatttttttttc

SEQ ID NO: 404923 - DNA, 20 bp, Artificial Sequence
  Description of Artificial Sequence: Synthetic oligonucleotide
  Target: LAMA2; (+) strand; PAM type: YTN; PAM sequence: TTG
ttataatttttttttcctaa

SEQ ID NO: 404924 - DNA, 20 bp, Artificial Sequence
  Description of Artificial Sequence: Synthetic oligonucleotide
  Target: LAMA2; (+) strand; PAM type: YTN; PAM sequence: TTA
taatttttttttcctaaaga

SEQ ID NO: 404925 - DNA, 20 bp, Artificial Sequence
  Description of Artificial Sequence: Synthetic oligonucleotide
  Target: LAMA2; (+) strand; PAM type: YTN; PAM sequence: TTT
ttttttcctaaagagagctt

SEQ ID NO: 404926 - DNA, 20 bp, Artificial Sequence
  Description of Artificial Sequence: Synthetic oligonucleotide
  Target: LAMA2; (+) strand; PAM type: YTN; PAM sequence: TTT
tttttcctaaagagagcttt

SEQ ID NO: 404927 - DNA, 20 bp, Artificial Sequence
  Description of Artificial Sequence: Synthetic oligonucleotide
  Target: LAMA2; (+) strand; PAM type: YTN; PAM sequence: TTT
ttttcctaaagagagctttc

SEQ ID NO: 404928 - DNA, 20 bp, Artificial Sequence
  Description of Artificial Sequence: Synthetic oligonucleotide
  Target: LAMA2; (+) strand; PAM type: YTN; PAM sequence: TTT
tttcctaaagagagctttcc

SEQ ID NO: 404929 - DNA, 20 bp, Artificial Sequence
  Description of Artificial Sequence: Synthetic oligonucleotide
  Target: LAMA2; (+) strand; PAM type: YTN; PAM sequence: TTT
ttcctaaagagagctttccc

SEQ ID NO: 404930 - DNA, 20 bp, Artificial Sequence
  Description of Artificial Sequence: Synthetic oligonucleotide
  Target: LAMA2; (+) strand; PAM type: YTN; PAM sequence: TTT
tcctaaagagagctttcccc

SEQ ID NO: 404931 - DNA, 20 bp, Artificial Sequence
  Description of Artificial Sequence: Synthetic oligonucleotide
  Target: LAMA2; (+) strand; PAM type: YTN; PAM sequence: TTT
cctaaagagagctttcccca

SEQ ID NO: 404932 - DNA, 20 bp, Artificial Sequence
  Description of Artificial Sequence: Synthetic oligonucleotide
  Target: LAMA2; (+) strand; PAM type: YTN; PAM sequence: TTC
ctaaagagagctttccccaa

SEQ ID NO: 404933 - DNA, 20 bp, Artificial Sequence
  Description of Artificial Sequence: Synthetic oligonucleotide
  Target: LAMA2; (+) strand; PAM type: YTN; PAM sequence: CTA
aagagagctttccccaaact

SEQ ID NO: 404934 - DNA, 20 bp, Artificial Sequence
  Description of Artificial Sequence: Synthetic oligonucleotide
  Target: LAMA2; (+) strand; PAM type: YTN; PAM sequence: CTT
tccccaaactgattaagttt

SEQ ID NO: 404935 - DNA, 20 bp, Artificial Sequence
  Description of Artificial Sequence: Synthetic oligonucleotide
  Target: LAMA2; (+) strand; PAM type: YTN; PAM sequence: TTT
ccccaaactgattaagtttc

SEQ ID NO: 404936 - DNA, 20 bp, Artificial Sequence
  Description of Artificial Sequence: Synthetic oligonucleotide
  Target: LAMA2; (+) strand; PAM type: YTN; PAM sequence: TTC
cccaaactgattaagtttca

SEQ ID NO: 404937 - DNA, 20 bp, Artificial Sequence
  Description of Artificial Sequence: Synthetic oligonucleotide
  Target: LAMA2; (+) strand; PAM type: YTN; PAM sequence: CTG
attaagtttcaggtcttgct

SEQ ID NO: 404938 - DNA, 20 bp, Artificial Sequence
  Description of Artificial Sequence: Synthetic oligonucleotide
  Target: LAMA2; (+) strand; PAM type: YTN; PAM sequence: TTA
agtttcaggtcttgctgagc

SEQ ID NO: 404939 - DNA, 20 bp, Artificial Sequence
  Description of Artificial Sequence: Synthetic oligonucleotide
  Target: LAMA2; (+) strand; PAM type: YTN; PAM sequence: TTT
caggtcttgctgagcatgaa

SEQ ID NO: 404940 - DNA, 20 bp, Artificial Sequence
  Description of Artificial Sequence: Synthetic oligonucleotide
  Target: LAMA2; (+) strand; PAM type: YTN; PAM sequence: TTC
aggtcttgctgagcatgaat

SEQ ID NO: 404941 - DNA, 20 bp, Artificial Sequence
  Description of Artificial Sequence: Synthetic oligonucleotide
  Target: LAMA2; (+) strand; PAM type: YTN; PAM sequence: CTT
gctgagcatgaattcactat

SEQ ID NO: 404942 - DNA, 20 bp, Artificial Sequence
  Description of Artificial Sequence: Synthetic oligonucleotide
  Target: LAMA2; (+) strand; PAM type: YTN; PAM sequence: TTG
ctgagcatgaattcactata

SEQ ID NO: 404943 - DNA, 20 bp, Artificial Sequence
  Description of Artificial Sequence: Synthetic oligonucleotide
  Target: LAMA2; (+) strand; PAM type: YTN; PAM sequence: CTG
agcatgaattcactatattt

SEQ ID NO: 404944 - DNA, 20 bp, Artificial Sequence
  Description of Artificial Sequence: Synthetic oligonucleotide
  Target: LAMA2; (+) strand; PAM type: YTN; PAM sequence: TTC
actatatttatgtttataac

SEQ ID NO: 404945 - DNA, 20 bp, Artificial Sequence
  Description of Artificial Sequence: Synthetic oligonucleotide
  Target: LAMA2; (+) strand; PAM type: YTN; PAM sequence: CTA
tatttatgtttataacaaaa

SEQ ID NO: 404946 - DNA, 20 bp, Artificial Sequence
  Description of Artificial Sequence: Synthetic oligonucleotide
  Target: LAMA2; (+) strand; PAM type: YTN; PAM sequence: TTT
atgtttataacaaaattaga

SEQ ID NO: 404947 - DNA, 20 bp, Artificial Sequence
  Description of Artificial Sequence: Synthetic oligonucleotide
  Target: LAMA2; (+) strand; PAM type: YTN; PAM sequence: TTA
tgtttataacaaaattagaa

SEQ ID NO: 404948 - DNA, 20 bp, Artificial Sequence
  Description of Artificial Sequence: Synthetic oligonucleotide
  Target: LAMA2; (+) strand; PAM type: YTN; PAM sequence: TTT
ataacaaaattagaacccca

SEQ ID NO: 404949 - DNA, 20 bp, Artificial Sequence
  Description of Artificial Sequence: Synthetic oligonucleotide
  Target: LAMA2; (+) strand; PAM type: YTN; PAM sequence: TTA
taacaaaattagaaccccag

SEQ ID NO: 404950 - DNA, 20 bp, Artificial Sequence
  Description of Artificial Sequence: Synthetic oligonucleotide
  Target: LAMA2; (+) strand; PAM type: YTN; PAM sequence: TTA
gaaccccagcctaggtttta

SEQ ID NO: 404951 - DNA, 20 bp, Artificial Sequence
  Description of Artificial Sequence: Synthetic oligonucleotide
  Target: LAMA2; (+) strand; PAM type: YTN; PAM sequence: CTA
ggttttatctcttacaggat

SEQ ID NO: 404952 - DNA, 20 bp, Artificial Sequence
  Description of Artificial Sequence: Synthetic oligonucleotide
  Target: LAMA2; (+) strand; PAM type: YTN; PAM sequence: TTT
tatctcttacaggatttttt

SEQ ID NO: 404953 - DNA, 20 bp, Artificial Sequence
  Description of Artificial Sequence: Synthetic oligonucleotide
  Target: LAMA2; (+) strand; PAM type: YTN; PAM sequence: TTT
atctcttacaggattttttt

SEQ ID NO: 404954 - DNA, 20 bp, Artificial Sequence
  Description of Artificial Sequence: Synthetic oligonucleotide
  Target: LAMA2; (+) strand; PAM type: YTN; PAM sequence: TTA
tctcttacaggatttttttt

SEQ ID NO: 404955 - DNA, 20 bp, Artificial Sequence
  Description of Artificial Sequence: Synthetic oligonucleotide
  Target: LAMA2; (+) strand; PAM type: YTN; PAM sequence: CTC
ttacaggatttttttttaat

SEQ ID NO: 404956 - DNA, 20 bp, Artificial Sequence
  Description of Artificial Sequence: Synthetic oligonucleotide
  Target: LAMA2; (+) strand; PAM type: YTN; PAM sequence: CTT
acaggatttttttttaattg

SEQ ID NO: 404957 - DNA, 20 bp, Artificial Sequence
  Description of Artificial Sequence: Synthetic oligonucleotide
  Target: LAMA2; (+) strand; PAM type: YTN; PAM sequence: TTA
caggatttttttttaattga

SEQ ID NO: 404958 - DNA, 20 bp, Artificial Sequence
  Description of Artificial Sequence: Synthetic oligonucleotide
  Target: LAMA2; (+) strand; PAM type: YTN; PAM sequence: TTT
ttttttaattgacacatagg

SEQ ID NO: 404959 - DNA, 20 bp, Artificial Sequence
  Description of Artificial Sequence: Synthetic oligonucleotide
  Target: LAMA2; (+) strand; PAM type: YTN; PAM sequence: TTT
tttttaattgacacatagga

SEQ ID NO: 404960 - DNA, 20 bp, Artificial Sequence
  Description of Artificial Sequence: Synthetic oligonucleotide
  Target: LAMA2; (+) strand; PAM type: YTN; PAM sequence: TTT
ttttaattgacacataggat

SEQ ID NO: 404961 - DNA, 20 bp, Artificial Sequence
  Description of Artificial Sequence: Synthetic oligonucleotide
  Target: LAMA2; (+) strand; PAM type: YTN; PAM sequence: TTT
tttaattgacacataggatc

SEQ ID NO: 404962 - DNA, 20 bp, Artificial Sequence
  Description of Artificial Sequence: Synthetic oligonucleotide
  Target: LAMA2; (+) strand; PAM type: YTN; PAM sequence: TTT
ttaattgacacataggatcc

SEQ ID NO: 404963 - DNA, 20 bp, Artificial Sequence
  Description of Artificial Sequence: Synthetic oligonucleotide
  Target: LAMA2; (+) strand; PAM type: YTN; PAM sequence: TTT
taattgacacataggatcct

SEQ ID NO: 404964 - DNA, 20 bp, Artificial Sequence
  Description of Artificial Sequence: Synthetic oligonucleotide
  Target: LAMA2; (+) strand; PAM type: YTN; PAM sequence: TTT
aattgacacataggatccta

SEQ ID NO: 404965 - DNA, 20 bp, Artificial Sequence
  Description of Artificial Sequence: Synthetic oligonucleotide
  Target: LAMA2; (+) strand; PAM type: YTN; PAM sequence: TTA
attgacacataggatcctac

SEQ ID NO: 404966 - DNA, 20 bp, Artificial Sequence
  Description of Artificial Sequence: Synthetic oligonucleotide
  Target: LAMA2; (+) strand; PAM type: YTN; PAM sequence: TTG
acacataggatcctacaagt

SEQ ID NO: 404967 - DNA, 20 bp, Artificial Sequence
  Description of Artificial Sequence: Synthetic oligonucleotide
  Target: LAMA2; (+) strand; PAM type: YTN; PAM sequence: CTA
caagtgcttcaactggaaac

SEQ ID NO: 404968 - DNA, 20 bp, Artificial Sequence
  Description of Artificial Sequence: Synthetic oligonucleotide
  Target: LAMA2; (+) strand; PAM type: YTN; PAM sequence: CTT
caactggaaacctatgggat

SEQ ID NO: 404969 - DNA, 20 bp, Artificial Sequence
  Description of Artificial Sequence: Synthetic oligonucleotide
  Target: LAMA2; (+) strand; PAM type: YTN; PAM sequence: TTC
aactggaaacctatgggatt

SEQ ID NO: 404970 - DNA, 20 bp, Artificial Sequence
  Description of Artificial Sequence: Synthetic oligonucleotide
  Target: LAMA2; (+) strand; PAM type: YTN; PAM sequence: CTG
gaaacctatgggatttaatg

SEQ ID NO: 404971 - DNA, 20 bp, Artificial Sequence
  Description of Artificial Sequence: Synthetic oligonucleotide
  Target: LAMA2; (+) strand; PAM type: YTN; PAM sequence: CTA
tgggatttaatgattctgct

SEQ ID NO: 404972 - DNA, 20 bp, Artificial Sequence
  Description of Artificial Sequence: Synthetic oligonucleotide
  Target: LAMA2; (+) strand; PAM type: YTN; PAM sequence: TTT
aatgattctgcttcaagaga

SEQ ID NO: 404973 - DNA, 20 bp, Artificial Sequence
  Description of Artificial Sequence: Synthetic oligonucleotide
  Target: LAMA2; (+) strand; PAM type: YTN; PAM sequence: TTA
atgattctgcttcaagagag

SEQ ID NO: 404974 - DNA, 20 bp, Artificial Sequence
  Description of Artificial Sequence: Synthetic oligonucleotide
  Target: LAMA2; (+) strand; PAM type: YTN; PAM sequence: TTC
tgcttcaagagagaaggaga

SEQ ID NO: 404975 - DNA, 20 bp, Artificial Sequence
  Description of Artificial Sequence: Synthetic oligonucleotide
  Target: LAMA2; (+) strand; PAM type: YTN; PAM sequence: CTG
cttcaagagagaaggagaac

SEQ ID NO: 404976 - DNA, 20 bp, Artificial Sequence
  Description of Artificial Sequence: Synthetic oligonucleotide
  Target: LAMA2; (+) strand; PAM type: YTN; PAM sequence: CTT
caagagagaaggagaacaag

SEQ ID NO: 404977 - DNA, 20 bp, Artificial Sequence
  Description of Artificial Sequence: Synthetic oligonucleotide
  Target: LAMA2; (+) strand; PAM type: YTN; PAM sequence: TTC
aagagagaaggagaacaagg

SEQ ID NO: 404978 - DNA, 20 bp, Artificial Sequence
  Description of Artificial Sequence: Synthetic oligonucleotide
  Target: LAMA2; (+) strand; PAM type: YTN; PAM sequence: TTC
ctaatacatgacctcaatta

SEQ ID NO: 404979 - DNA, 20 bp, Artificial Sequence
  Description of Artificial Sequence: Synthetic oligonucleotide
  Target: LAMA2; (+) strand; PAM type: YTN; PAM sequence: CTA
atacatgacctcaattataa

SEQ ID NO: 404980 - DNA, 20 bp, Artificial Sequence
  Description of Artificial Sequence: Synthetic oligonucleotide
  Target: LAMA2; (+) strand; PAM type: YTN; PAM sequence: CTC
aattataagatagagggtag

SEQ ID NO: 404981 - DNA, 20 bp, Artificial Sequence
  Description of Artificial Sequence: Synthetic oligonucleotide
  Target: LAMA2; (+) strand; PAM type: YTN; PAM sequence: TTA
taagatagagggtagaatga

SEQ ID NO: 404982 - DNA, 20 bp, Artificial Sequence
  Description of Artificial Sequence: Synthetic oligonucleotide
  Target: LAMA2; (+) strand; PAM type: YTN; PAM sequence: TTT
gaaaatatttaacatcctat

SEQ ID NO: 404983 - DNA, 20 bp, Artificial Sequence
  Description of Artificial Sequence: Synthetic oligonucleotide
  Target: LAMA2; (+) strand; PAM type: YTN; PAM sequence: TTG
aaaatatttaacatcctatc

SEQ ID NO: 404984 - DNA, 20 bp, Artificial Sequence
  Description of Artificial Sequence: Synthetic oligonucleotide
  Target: LAMA2; (+) strand; PAM type: YTN; PAM sequence: TTT
aacatcctatcatactaagc

SEQ ID NO: 404985 - DNA, 20 bp, Artificial Sequence
  Description of Artificial Sequence: Synthetic oligonucleotide
  Target: LAMA2; (+) strand; PAM type: YTN; PAM sequence: TTA
acatcctatcatactaagca

SEQ ID NO: 404986 - DNA, 20 bp, Artificial Sequence
  Description of Artificial Sequence: Synthetic oligonucleotide
  Target: LAMA2; (+) strand; PAM type: YTN; PAM sequence: CTA
tcatactaagcatgtgtaga

SEQ ID NO: 404987 - DNA, 20 bp, Artificial Sequence
  Description of Artificial Sequence: Synthetic oligonucleotide
  Target: LAMA2; (+) strand; PAM type: YTN; PAM sequence: CTA
agcatgtgtagagaataaac

SEQ ID NO: 404988 - DNA, 20 bp, Artificial Sequence
  Description of Artificial Sequence: Synthetic oligonucleotide
  Target: LAMA2; (+) strand; PAM type: YTN; PAM sequence: CTT
ttatataaaaatgaatacag

SEQ ID NO: 404989 - DNA, 20 bp, Artificial Sequence
  Description of Artificial Sequence: Synthetic oligonucleotide
  Target: LAMA2; (+) strand; PAM type: YTN; PAM sequence: TTT
tatataaaaatgaatacagg

SEQ ID NO: 404990 - DNA, 20 bp, Artificial Sequence
  Description of Artificial Sequence: Synthetic oligonucleotide
  Target: LAMA2; (+) strand; PAM type: YTN; PAM sequence: TTT
atataaaaatgaatacagga

SEQ ID NO: 404991 - DNA, 20 bp, Artificial Sequence
  Description of Artificial Sequence: Synthetic oligonucleotide
  Target: LAMA2; (+) strand; PAM type: YTN; PAM sequence: TTA
tataaaaatgaatacaggat

SEQ ID NO: 404992 - DNA, 20 bp, Artificial Sequence
  Description of Artificial Sequence: Synthetic oligonucleotide
  Target: LAMA2; (+) strand; PAM type: YTN; PAM sequence: TTT
agctataagtagaggatttc

SEQ ID NO: 404993 - DNA, 20 bp, Artificial Sequence
  Description of Artificial Sequence: Synthetic oligonucleotide
  Target: LAMA2; (+) strand; PAM type: YTN; PAM sequence: TTA
gctataagtagaggatttct

SEQ ID NO: 404994 - DNA, 20 bp, Artificial Sequence
  Description of Artificial Sequence: Synthetic oligonucleotide
  Target: LAMA2; (+) strand; PAM type: YTN; PAM sequence: CTA
taagtagaggatttctcagc

SEQ ID NO: 404995 - DNA, 20 bp, Artificial Sequence
  Description of Artificial Sequence: Synthetic oligonucleotide
  Target: LAMA2; (+) strand; PAM type: YTN; PAM sequence: TTT
ctcagcataaaaatcttaga

SEQ ID NO: 404996 - DNA, 20 bp, Artificial Sequence
  Description of Artificial Sequence: Synthetic oligonucleotide
  Target: LAMA2; (+) strand; PAM type: YTN; PAM sequence: TTC
tcagcataaaaatcttagag

SEQ ID NO: 404997 - DNA, 20 bp, Artificial Sequence
  Description of Artificial Sequence: Synthetic oligonucleotide
  Target: LAMA2; (+) strand; PAM type: YTN; PAM sequence: CTC
agcataaaaatcttagagcc

SEQ ID NO: 404998 - DNA, 20 bp, Artificial Sequence
  Description of Artificial Sequence: Synthetic oligonucleotide
  Target: LAMA2; (+) strand; PAM type: YTN; PAM sequence: CTT
agagcccacttatcacccaa

SEQ ID NO: 404999 - DNA, 20 bp, Artificial Sequence
  Description of Artificial Sequence: Synthetic oligonucleotide
  Target: LAMA2; (+) strand; PAM type: YTN; PAM sequence: TTA
gagcccacttatcacccaag

SEQ ID NO: 405000 - DNA, 20 bp, Artificial Sequence
  Description of Artificial Sequence: Synthetic oligonucleotide
  Target: LAMA2; (+) strand; PAM type: YTN; PAM sequence: CTT
atcacccaagcctaaagcaa

SEQ ID NO: 405001 - DNA, 20 bp, Artificial Sequence
  Description of Artificial Sequence: Synthetic oligonucleotide
  Target: LAMA2; (+) strand; PAM type: YTN; PAM sequence: TTA
tcacccaagcctaaagcaat

SEQ ID NO: 405002 - DNA, 20 bp, Artificial Sequence
  Description of Artificial Sequence: Synthetic oligonucleotide
  Target: LAMA2; (+) strand; PAM type: YTN; PAM sequence: CTA
aagcaattttgttaaattaa

SEQ ID NO: 405003 - DNA, 20 bp, Artificial Sequence
  Description of Artificial Sequence: Synthetic oligonucleotide
  Target: LAMA2; (+) strand; PAM type: YTN; PAM sequence: TTT
tgttaaattaaaactataaa

SEQ ID NO: 405004 - DNA, 20 bp, Artificial Sequence
  Description of Artificial Sequence: Synthetic oligonucleotide
  Target: LAMA2; (+) strand; PAM type: YTN; PAM sequence: TTT
gttaaattaaaactataaaa

SEQ ID NO: 405005 - DNA, 20 bp, Artificial Sequence
  Description of Artificial Sequence: Synthetic oligonucleotide
  Target: LAMA2; (+) strand; PAM type: YTN; PAM sequence: TTG
ttaaattaaaactataaaac

SEQ ID NO: 405006 - DNA, 20 bp, Artificial Sequence
  Description of Artificial Sequence: Synthetic oligonucleotide
  Target: LAMA2; (+) strand; PAM type: YTN; PAM sequence: TTA
aattaaaactataaaacata

SEQ ID NO: 405007 - DNA, 20 bp, Artificial Sequence
  Description of Artificial Sequence: Synthetic oligonucleotide
  Target: LAMA2; (+) strand; PAM type: YTN; PAM sequence: TTA
aaactataaaacatacttta

SEQ ID NO: 405008 - DNA, 20 bp, Artificial Sequence
  Description of Artificial Sequence: Synthetic oligonucleotide
  Target: LAMA2; (+) strand; PAM type: YTN; PAM sequence: CTA
taaaacatactttaaatacc

SEQ ID NO: 405009 - DNA, 20 bp, Artificial Sequence
  Description of Artificial Sequence: Synthetic oligonucleotide
  Target: LAMA2; (+) strand; PAM type: YTN; PAM sequence: CTT
taaatacctgcaaagttaac

SEQ ID NO: 405010 - DNA, 20 bp, Artificial Sequence
  Description of Artificial Sequence: Synthetic oligonucleotide
  Target: LAMA2; (+) strand; PAM type: YTN; PAM sequence: TTT
aaatacctgcaaagttaaca

SEQ ID NO: 405011 - DNA, 20 bp, Artificial Sequence
  Description of Artificial Sequence: Synthetic oligonucleotide
  Target: LAMA2; (+) strand; PAM type: YTN; PAM sequence: TTA
aatacctgcaaagttaacat

SEQ ID NO: 405012 - DNA, 20 bp, Artificial Sequence
  Description of Artificial Sequence: Synthetic oligonucleotide
  Target: LAMA2; (+) strand; PAM type: YTN; PAM sequence: CTG
caaagttaacatgtcataac

SEQ ID NO: 405013 - DNA, 20 bp, Artificial Sequence
  Description of Artificial Sequence: Synthetic oligonucleotide
  Target: LAMA2; (+) strand; PAM type: YTN; PAM sequence: TTA
acatgtcataacagcaactc

SEQ ID NO: 405014 - DNA, 20 bp, Artificial Sequence
  Description of Artificial Sequence: Synthetic oligonucleotide
  Target: LAMA2; (+) strand; PAM type: YTN; PAM sequence: CTC
aaaaaccattaagtgctaag

SEQ ID NO: 405015 - DNA, 20 bp, Artificial Sequence
  Description of Artificial Sequence: Synthetic oligonucleotide
  Target: LAMA2; (+) strand; PAM type: YTN; PAM sequence: TTA
agtgctaaggagtttgtgtt

SEQ ID NO: 405016 - DNA, 20 bp, Artificial Sequence
  Description of Artificial Sequence: Synthetic oligonucleotide
  Target: LAMA2; (+) strand; PAM type: YTN; PAM sequence: CTA
aggagtttgtgttattttcc

SEQ ID NO: 405017 - DNA, 20 bp, Artificial Sequence
  Description of Artificial Sequence: Synthetic oligonucleotide
  Target: LAMA2; (+) strand; PAM type: YTN; PAM sequence: TTT
gtgttattttccatttaaag

SEQ ID NO: 405018 - DNA, 20 bp, Artificial Sequence
  Description of Artificial Sequence: Synthetic oligonucleotide
  Target: LAMA2; (+) strand; PAM type: YTN; PAM sequence: TTG
tgttattttccatttaaagg

SEQ ID NO: 405019 - DNA, 20 bp, Artificial Sequence
  Description of Artificial Sequence: Synthetic oligonucleotide
  Target: LAMA2; (+) strand; PAM type: YTN; PAM sequence: TTA
ttttccatttaaaggatata

SEQ ID NO: 405020 - DNA, 20 bp, Artificial Sequence
  Description of Artificial Sequence: Synthetic oligonucleotide
  Target: LAMA2; (+) strand; PAM type: YTN; PAM sequence: TTT
tccatttaaaggatatacat

SEQ ID NO: 405021 - DNA, 20 bp, Artificial Sequence
  Description of Artificial Sequence: Synthetic oligonucleotide
  Target: LAMA2; (+) strand; PAM type: YTN; PAM sequence: TTT
ccatttaaaggatatacata

SEQ ID NO: 405022 - DNA, 20 bp, Artificial Sequence
  Description of Artificial Sequence: Synthetic oligonucleotide
  Target: LAMA2; (+) strand; PAM type: YTN; PAM sequence: TTC
catttaaaggatatacatac

SEQ ID NO: 405023 - DNA, 20 bp, Artificial Sequence
  Description of Artificial Sequence: Synthetic oligonucleotide
  Target: LAMA2; (+) strand; PAM type: YTN; PAM sequence: TTT
aaaggatatacatacgtttc

SEQ ID NO: 405024 - DNA, 20 bp, Artificial Sequence
  Description of Artificial Sequence: Synthetic oligonucleotide
  Target: LAMA2; (+) strand; PAM type: YTN; PAM sequence: TTA
aaggatatacatacgtttct

SEQ ID NO: 405025 - DNA, 20 bp, Artificial Sequence
  Description of Artificial Sequence: Synthetic oligonucleotide
  Target: LAMA2; (+) strand; PAM type: YTN; PAM sequence: TTT
ctaggacccaaatcctagca

SEQ ID NO: 405026 - DNA, 20 bp, Artificial Sequence
  Description of Artificial Sequence: Synthetic oligonucleotide
  Target: LAMA2; (+) strand; PAM type: YTN; PAM sequence: TTC
taggacccaaatcctagcaa

SEQ ID NO: 405027 - DNA, 20 bp, Artificial Sequence
  Description of Artificial Sequence: Synthetic oligonucleotide
  Target: LAMA2; (+) strand; PAM type: YTN; PAM sequence: CTA
ggacccaaatcctagcaaag

SEQ ID NO: 405028 - DNA, 20 bp, Artificial Sequence
  Description of Artificial Sequence: Synthetic oligonucleotide
  Target: LAMA2; (+) strand; PAM type: YTN; PAM sequence: CTA
gcaaagtacacttcacattt

SEQ ID NO: 405029 - DNA, 20 bp, Artificial Sequence
  Description of Artificial Sequence: Synthetic oligonucleotide
  Target: LAMA2; (+) strand; PAM type: YTN; PAM sequence: CTT
cacatttctttctctacatc

SEQ ID NO: 405030 - DNA, 20 bp, Artificial Sequence
  Description of Artificial Sequence: Synthetic oligonucleotide
  Target: LAMA2; (+) strand; PAM type: YTN; PAM sequence: TTC
acatttctttctctacatct

SEQ ID NO: 405031 - DNA, 20 bp, Artificial Sequence
  Description of Artificial Sequence: Synthetic oligonucleotide
  Target: LAMA2; (+) strand; PAM type: YTN; PAM sequence: TTT
ctttctctacatctctagag

SEQ ID NO: 405032 - DNA, 20 bp, Artificial Sequence
  Description of Artificial Sequence: Synthetic oligonucleotide
  Target: LAMA2; (+) strand; PAM type: YTN; PAM sequence: TTC
tttctctacatctctagagt

SEQ ID NO: 405033 - DNA, 20 bp, Artificial Sequence
  Description of Artificial Sequence: Synthetic oligonucleotide
  Target: LAMA2; (+) strand; PAM type: YTN; PAM sequence: CTT
tctctacatctctagagttt

SEQ ID NO: 405034 - DNA, 20 bp, Artificial Sequence
  Description of Artificial Sequence: Synthetic oligonucleotide
  Target: LAMA2; (+) strand; PAM type: YTN; PAM sequence: TTT
ctctacatctctagagtttc

SEQ ID NO: 405035 - DNA, 20 bp, Artificial Sequence
  Description of Artificial Sequence: Synthetic oligonucleotide
  Target: LAMA2; (+) strand; PAM type: YTN; PAM sequence: TTC
tctacatctctagagtttca

SEQ ID NO: 405036 - DNA, 20 bp, Artificial Sequence
  Description of Artificial Sequence: Synthetic oligonucleotide
  Target: LAMA2; (+) strand; PAM type: YTN; PAM sequence: CTC
tacatctctagagtttcata

SEQ ID NO: 405037 - DNA, 20 bp, Artificial Sequence
  Description of Artificial Sequence: Synthetic oligonucleotide
  Target: LAMA2; (+) strand; PAM type: YTN; PAM sequence: CTA
catctctagagtttcataga

SEQ ID NO: 405038 - DNA, 20 bp, Artificial Sequence
  Description of Artificial Sequence: Synthetic oligonucleotide
  Target: LAMA2; (+) strand; PAM type: YTN; PAM sequence: CTC
tagagtttcatagaagaaag

SEQ ID NO: 405039 - DNA, 20 bp, Artificial Sequence
  Description of Artificial Sequence: Synthetic oligonucleotide
  Target: LAMA2; (+) strand; PAM type: YTN; PAM sequence: CTA
gagtttcatagaagaaagta

SEQ ID NO: 405040 - DNA, 20 bp, Artificial Sequence
  Description of Artificial Sequence: Synthetic oligonucleotide
  Target: LAMA2; (+) strand; PAM type: YTN; PAM sequence: TTT
catagaagaaagtagcccca

SEQ ID NO: 405041 - DNA, 20 bp, Artificial Sequence
  Description of Artificial Sequence: Synthetic oligonucleotide
  Target: LAMA2; (+) strand; PAM type: YTN; PAM sequence: TTC
atagaagaaagtagccccaa

SEQ ID NO: 405042 - DNA, 20 bp, Artificial Sequence
  Description of Artificial Sequence: Synthetic oligonucleotide
  Target: LAMA2; (+) strand; PAM type: YTN; PAM sequence: TTA
tccctctaaaagtcttaact

SEQ ID NO: 405043 - DNA, 20 bp, Artificial Sequence
  Description of Artificial Sequence: Synthetic oligonucleotide
  Target: LAMA2; (+) strand; PAM type: YTN; PAM sequence: CTC
taaaagtcttaacttccaac

SEQ ID NO: 405044 - DNA, 20 bp, Artificial Sequence
  Description of Artificial Sequence: Synthetic oligonucleotide
  Target: LAMA2; (+) strand; PAM type: YTN; PAM sequence: CTA
aaagtcttaacttccaactc

SEQ ID NO: 405045 - DNA, 20 bp, Artificial Sequence
  Description of Artificial Sequence: Synthetic oligonucleotide
  Target: LAMA2; (+) strand; PAM type: YTN; PAM sequence: CTT
aacttccaactctttgtttc

SEQ ID NO: 405046 - DNA, 20 bp, Artificial Sequence
  Description of Artificial Sequence: Synthetic oligonucleotide
  Target: LAMA2; (+) strand; PAM type: YTN; PAM sequence: TTA
acttccaactctttgtttct

SEQ ID NO: 405047 - DNA, 20 bp, Artificial Sequence
  Description of Artificial Sequence: Synthetic oligonucleotide
  Target: LAMA2; (+) strand; PAM type: YTN; PAM sequence: CTT
ccaactctttgtttcttttt

SEQ ID NO: 405048 - DNA, 20 bp, Artificial Sequence
  Description of Artificial Sequence: Synthetic oligonucleotide
  Target: LAMA2; (+) strand; PAM type: YTN; PAM sequence: TTC
caactctttgtttctttttg

SEQ ID NO: 405049 - DNA, 20 bp, Artificial Sequence
  Description of Artificial Sequence: Synthetic oligonucleotide
  Target: LAMA2; (+) strand; PAM type: YTN; PAM sequence: CTC
tttgtttctttttgacatca

SEQ ID NO: 405050 - DNA, 20 bp, Artificial Sequence
  Description of Artificial Sequence: Synthetic oligonucleotide
  Target: LAMA2; (+) strand; PAM type: YTN; PAM sequence: CTT
tgtttctttttgacatcatg

SEQ ID NO: 405051 - DNA, 20 bp, Artificial Sequence
  Description of Artificial Sequence: Synthetic oligonucleotide
  Target: LAMA2; (+) strand; PAM type: YTN; PAM sequence: TTT
gtttctttttgacatcatgg

SEQ ID NO: 405052 - DNA, 20 bp, Artificial Sequence
  Description of Artificial Sequence: Synthetic oligonucleotide
  Target: LAMA2; (+) strand; PAM type: YTN; PAM sequence: TTG
tttctttttgacatcatgga

SEQ ID NO: 405053 - DNA, 20 bp, Artificial Sequence
  Description of Artificial Sequence: Synthetic oligonucleotide
  Target: LAMA2; (+) strand; PAM type: YTN; PAM sequence: TTT
ctttttgacatcatggactt

SEQ ID NO: 405054 - DNA, 20 bp, Artificial Sequence
  Description of Artificial Sequence: Synthetic oligonucleotide
  Target: LAMA2; (+) strand; PAM type: YTN; PAM sequence: TTC
tttttgacatcatggacttg

SEQ ID NO: 405055 - DNA, 20 bp, Artificial Sequence
  Description of Artificial Sequence: Synthetic oligonucleotide
  Target: LAMA2; (+) strand; PAM type: YTN; PAM sequence: CTT
tttgacatcatggacttgtc

SEQ ID NO: 405056 - DNA, 20 bp, Artificial Sequence
  Description of Artificial Sequence: Synthetic oligonucleotide
  Target: LAMA2; (+) strand; PAM type: YTN; PAM sequence: TTT
ttgacatcatggacttgtca

SEQ ID NO: 405057 - DNA, 20 bp, Artificial Sequence
  Description of Artificial Sequence: Synthetic oligonucleotide
  Target: LAMA2; (+) strand; PAM type: YTN; PAM sequence: TTT
tgacatcatggacttgtcaa

SEQ ID NO: 405058 - DNA, 20 bp, Artificial Sequence
  Description of Artificial Sequence: Synthetic oligonucleotide
  Target: LAMA2; (+) strand; PAM type: YTN; PAM sequence: TTT
gacatcatggacttgtcaac

SEQ ID NO: 405059 - DNA, 20 bp, Artificial Sequence
  Description of Artificial Sequence: Synthetic oligonucleotide
  Target: LAMA2; (+) strand; PAM type: YTN; PAM sequence: TTG
acatcatggacttgtcaaca

SEQ ID NO: 405060 - DNA, 20 bp, Artificial Sequence
  Description of Artificial Sequence: Synthetic oligonucleotide
  Target: LAMA2; (+) strand; PAM type: YTN; PAM sequence: CTT
gtcaacatgaaattgaggat

SEQ ID NO: 405061 - DNA, 20 bp, Artificial Sequence
  Description of Artificial Sequence: Synthetic oligonucleotide
  Target: LAMA2; (+) strand; PAM type: YTN; PAM sequence: TTG
tcaacatgaaattgaggata

SEQ ID NO: 405062 - DNA, 20 bp, Artificial Sequence
  Description of Artificial Sequence: Synthetic oligonucleotide
  Target: LAMA2; (+) strand; PAM type: YTN; PAM sequence: TTG
aggatagtttgaaagcgtga

SEQ ID NO: 405063 - DNA, 20 bp, Artificial Sequence
  Description of Artificial Sequence: Synthetic oligonucleotide
  Target: LAMA2; (+) strand; PAM type: YTN; PAM sequence: TTT
gaaagcgtgacccattcatt

SEQ ID NO: 405064 - DNA, 20 bp, Artificial Sequence
  Description of Artificial Sequence: Synthetic oligonucleotide
  Target: LAMA2; (+) strand; PAM type: YTN; PAM sequence: TTG
aaagcgtgacccattcattg

SEQ ID NO: 405065 - DNA, 20 bp, Artificial Sequence
  Description of Artificial Sequence: Synthetic oligonucleotide
  Target: LAMA2; (+) strand; PAM type: YTN; PAM sequence: TTC
attgtttaaaatggttttgt

SEQ ID NO: 405066 - DNA, 20 bp, Artificial Sequence
  Description of Artificial Sequence: Synthetic oligonucleotide
  Target: LAMA2; (+) strand; PAM type: YTN; PAM sequence: TTG
tttaaaatggttttgtcaat

SEQ ID NO: 405067 - DNA, 20 bp, Artificial Sequence
  Description of Artificial Sequence: Synthetic oligonucleotide
  Target: LAMA2; (+) strand; PAM type: YTN; PAM sequence: TTT
aaaatggttttgtcaataat

SEQ ID NO: 405068 - DNA, 20 bp, Artificial Sequence
  Description of Artificial Sequence: Synthetic oligonucleotide
  Target: LAMA2; (+) strand; PAM type: YTN; PAM sequence: TTA
aaatggttttgtcaataatc

SEQ ID NO: 405069 - DNA, 20 bp, Artificial Sequence
  Description of Artificial Sequence: Synthetic oligonucleotide
  Target: LAMA2; (+) strand; PAM type: YTN; PAM sequence: TTT
tgtcaataatcttaaacaaa

SEQ ID NO: 405070 - DNA, 20 bp, Artificial Sequence
  Description of Artificial Sequence: Synthetic oligonucleotide
  Target: LAMA2; (+) strand; PAM type: YTN; PAM sequence: TTT
gtcaataatcttaaacaaaa

SEQ ID NO: 405071 - DNA, 20 bp, Artificial Sequence
  Description of Artificial Sequence: Synthetic oligonucleotide
  Target: LAMA2; (+) strand; PAM type: YTN; PAM sequence: TTG
tcaataatcttaaacaaaat

SEQ ID NO: 405072 - DNA, 20 bp, Artificial Sequence
  Description of Artificial Sequence: Synthetic oligonucleotide
  Target: LAMA2; (+) strand; PAM type: YTN; PAM sequence: CTT
aaacaaaatttaacatggaa

SEQ ID NO: 405073 - DNA, 20 bp, Artificial Sequence
  Description of Artificial Sequence: Synthetic oligonucleotide
  Target: LAMA2; (+) strand; PAM type: YTN; PAM sequence: TTA
aacaaaatttaacatggaag

SEQ ID NO: 405074 - DNA, 20 bp, Artificial Sequence
  Description of Artificial Sequence: Synthetic oligonucleotide
  Target: LAMA2; (+) strand; PAM type: YTN; PAM sequence: TTT
aacatggaaggttgtctgta

SEQ ID NO: 405075 - DNA, 20 bp, Artificial Sequence
  Description of Artificial Sequence: Synthetic oligonucleotide
  Target: LAMA2; (+) strand; PAM type: YTN; PAM sequence: TTA
acatggaaggttgtctgtaa

SEQ ID NO: 405076 - DNA, 20 bp, Artificial Sequence
  Description of Artificial Sequence: Synthetic oligonucleotide
  Target: LAMA2; (+) strand; PAM type: YTN; PAM sequence: TTG
tctgtaaaattctttcaata

SEQ ID NO: 405077 - DNA, 20 bp, Artificial Sequence
  Description of Artificial Sequence: Synthetic oligonucleotide
  Target: LAMA2; (+) strand; PAM type: YTN; PAM sequence: CTG
taaaattctttcaatacatg

SEQ ID NO: 405078 - DNA, 20 bp, Artificial Sequence
  Description of Artificial Sequence: Synthetic oligonucleotide
  Target: LAMA2; (+) strand; PAM type: YTN; PAM sequence: TTC
tttcaatacatgaaagacag

SEQ ID NO: 405079 - DNA, 20 bp, Artificial Sequence
  Description of Artificial Sequence: Synthetic oligonucleotide
  Target: LAMA2; (+) strand; PAM type: YTN; PAM sequence: CTT
tcaatacatgaaagacagtg

SEQ ID NO: 405080 - DNA, 20 bp, Artificial Sequence
  Description of Artificial Sequence: Synthetic oligonucleotide
  Target: LAMA2; (+) strand; PAM type: YTN; PAM sequence: TTT
caatacatgaaagacagtga

SEQ ID NO: 405081 - DNA, 20 bp, Artificial Sequence
  Description of Artificial Sequence: Synthetic oligonucleotide
  Target: LAMA2; (+) strand; PAM type: YTN; PAM sequence: TTC
aatacatgaaagacagtgaa

SEQ ID NO: 405082 - DNA, 20 bp, Artificial Sequence
  Description of Artificial Sequence: Synthetic oligonucleotide
  Target: LAMA2; (+) strand; PAM type: YTN; PAM sequence: TTA
atattctgctactcacaaac

SEQ ID NO: 405083 - DNA, 20 bp, Artificial Sequence
  Description of Artificial Sequence: Synthetic oligonucleotide
  Target: LAMA2; (+) strand; PAM type: YTN; PAM sequence: TTC
tgctactcacaaaccaacac

SEQ ID NO: 405084 - DNA, 20 bp, Artificial Sequence
  Description of Artificial Sequence: Synthetic oligonucleotide
  Target: LAMA2; (+) strand; PAM type: YTN; PAM sequence: CTG
ctactcacaaaccaacacca

SEQ ID NO: 405085 - DNA, 20 bp, Artificial Sequence
  Description of Artificial Sequence: Synthetic oligonucleotide
  Target: LAMA2; (+) strand; PAM type: YTN; PAM sequence: CTA
ctcacaaaccaacaccaact

SEQ ID NO: 405086 - DNA, 20 bp, Artificial Sequence
  Description of Artificial Sequence: Synthetic oligonucleotide
  Target: LAMA2; (+) strand; PAM type: YTN; PAM sequence: CTC
acaaaccaacaccaactttt

SEQ ID NO: 405087 - DNA, 20 bp, Artificial Sequence
  Description of Artificial Sequence: Synthetic oligonucleotide
  Target: LAMA2; (+) strand; PAM type: YTN; PAM sequence: CTT
ttccctaagcgtttctttgg

SEQ ID NO: 405088 - DNA, 20 bp, Artificial Sequence
  Description of Artificial Sequence: Synthetic oligonucleotide
  Target: LAMA2; (+) strand; PAM type: YTN; PAM sequence: TTT
tccctaagcgtttctttggt

SEQ ID NO: 405089 - DNA, 20 bp, Artificial Sequence
  Description of Artificial Sequence: Synthetic oligonucleotide
  Target: LAMA2; (+) strand; PAM type: YTN; PAM sequence: TTT
ccctaagcgtttctttggta

SEQ ID NO: 405090 - DNA, 20 bp, Artificial Sequence
  Description of Artificial Sequence: Synthetic oligonucleotide
  Target: LAMA2; (+) strand; PAM type: YTN; PAM sequence: TTC
cctaagcgtttctttggtaa

SEQ ID NO: 405091 - DNA, 20 bp, Artificial Sequence
  Description of Artificial Sequence: Synthetic oligonucleotide
  Target: LAMA2; (+) strand; PAM type: YTN; PAM sequence: CTA
agcgtttctttggtaaactt

SEQ ID NO: 405092 - DNA, 20 bp, Artificial Sequence
  Description of Artificial Sequence: Synthetic oligonucleotide
  Target: LAMA2; (+) strand; PAM type: YTN; PAM sequence: TTT
ctttggtaaacttctaagta

SEQ ID NO: 405093 - DNA, 20 bp, Artificial Sequence
  Description of Artificial Sequence: Synthetic oligonucleotide
  Target: LAMA2; (+) strand; PAM type: YTN; PAM sequence: TTC
tttggtaaacttctaagtag

SEQ ID NO: 405094 - DNA, 20 bp, Artificial Sequence
  Description of Artificial Sequence: Synthetic oligonucleotide
  Target: LAMA2; (+) strand; PAM type: YTN; PAM sequence: CTT
tggtaaacttctaagtagga

SEQ ID NO: 405095 - DNA, 20 bp, Artificial Sequence
  Description of Artificial Sequence: Synthetic oligonucleotide
  Target: LAMA2; (+) strand; PAM type: YTN; PAM sequence: TTT
ggtaaacttctaagtaggat

SEQ ID NO: 405096 - DNA, 20 bp, Artificial Sequence
  Description of Artificial Sequence: Synthetic oligonucleotide
  Target: LAMA2; (+) strand; PAM type: YTN; PAM sequence: TTG
gtaaacttctaagtaggatt

SEQ ID NO: 405097 - DNA, 20 bp, Artificial Sequence
  Description of Artificial Sequence: Synthetic oligonucleotide
  Target: LAMA2; (+) strand; PAM type: YTN; PAM sequence: CTT
ctaagtaggattttcaaaag

SEQ ID NO: 405098 - DNA, 20 bp, Artificial Sequence
  Description of Artificial Sequence: Synthetic oligonucleotide
  Target: LAMA2; (+) strand; PAM type: YTN; PAM sequence: TTC
taagtaggattttcaaaagc

SEQ ID NO: 405099 - DNA, 20 bp, Artificial Sequence
  Description of Artificial Sequence: Synthetic oligonucleotide
  Target: LAMA2; (+) strand; PAM type: YTN; PAM sequence: CTA
agtaggattttcaaaagcct

SEQ ID NO: 405100 - DNA, 20 bp, Artificial Sequence
  Description of Artificial Sequence: Synthetic oligonucleotide
  Target: LAMA2; (+) strand; PAM type: YTN; PAM sequence: TTT
tcaaaagcctattatcaaca

SEQ ID NO: 405101 - DNA, 20 bp, Artificial Sequence
  Description of Artificial Sequence: Synthetic oligonucleotide
  Target: LAMA2; (+) strand; PAM type: YTN; PAM sequence: TTT
caaaagcctattatcaacaa

SEQ ID NO: 405102 - DNA, 20 bp, Artificial Sequence
  Description of Artificial Sequence: Synthetic oligonucleotide
  Target: LAMA2; (+) strand; PAM type: YTN; PAM sequence: TTC
aaaagcctattatcaacaac

SEQ ID NO: 405103 - DNA, 20 bp, Artificial Sequence
  Description of Artificial Sequence: Synthetic oligonucleotide
  Target: LAMA2; (+) strand; PAM type: YTN; PAM sequence: CTA
ttatcaacaacaaaacatct

SEQ ID NO: 405104 - DNA, 20 bp, Artificial Sequence
  Description of Artificial Sequence: Synthetic oligonucleotide
  Target: LAMA2; (+) strand; PAM type: YTN; PAM sequence: TTA
tcaacaacaaaacatctaag

SEQ ID NO: 405105 - DNA, 20 bp, Artificial Sequence
  Description of Artificial Sequence: Synthetic oligonucleotide
  Target: LAMA2; (+) strand; PAM type: YTN; PAM sequence: CTA
aggcatttaaatatccattc

SEQ ID NO: 405106 - DNA, 20 bp, Artificial Sequence
  Description of Artificial Sequence: Synthetic oligonucleotide
  Target: LAMA2; (+) strand; PAM type: YTN; PAM sequence: TTT
aaatatccattcagcagtgc

SEQ ID NO: 405107 - DNA, 20 bp, Artificial Sequence
  Description of Artificial Sequence: Synthetic oligonucleotide
  Target: LAMA2; (+) strand; PAM type: YTN; PAM sequence: TTA
aatatccattcagcagtgca

SEQ ID NO: 405108 - DNA, 20 bp, Artificial Sequence
  Description of Artificial Sequence: Synthetic oligonucleotide
  Target: LAMA2; (+) strand; PAM type: YTN; PAM sequence: TTC
agcagtgcatgtcatgtgaa

SEQ ID NO: 405109 - DNA, 20 bp, Artificial Sequence
  Description of Artificial Sequence: Synthetic oligonucleotide
  Target: LAMA2; (+) strand; PAM type: YTN; PAM sequence: CTG
taacatcactaattatcaat

SEQ ID NO: 405110 - DNA, 20 bp, Artificial Sequence
  Description of Artificial Sequence: Synthetic oligonucleotide
  Target: LAMA2; (+) strand; PAM type: YTN; PAM sequence: CTA
attatcaattctgcaaagat

SEQ ID NO: 405111 - DNA, 20 bp, Artificial Sequence
  Description of Artificial Sequence: Synthetic oligonucleotide
  Target: LAMA2; (+) strand; PAM type: YTN; PAM sequence: TTA
tcaattctgcaaagattttg

SEQ ID NO: 405112 - DNA, 20 bp, Artificial Sequence
  Description of Artificial Sequence: Synthetic oligonucleotide
  Target: LAMA2; (+) strand; PAM type: YTN; PAM sequence: TTC
tgcaaagattttgcacttca

SEQ ID NO: 405113 - DNA, 20 bp, Artificial Sequence
  Description of Artificial Sequence: Synthetic oligonucleotide
  Target: LAMA2; (+) strand; PAM type: YTN; PAM sequence: CTG
caaagattttgcacttcaac

SEQ ID NO: 405114 - DNA, 20 bp, Artificial Sequence
  Description of Artificial Sequence: Synthetic oligonucleotide
  Target: LAMA2; (+) strand; PAM type: YTN; PAM sequence: TTT
tgcacttcaacacataaagt

SEQ ID NO: 405115 - DNA, 20 bp, Artificial Sequence
  Description of Artificial Sequence: Synthetic oligonucleotide
  Target: LAMA2; (+) strand; PAM type: YTN; PAM sequence: TTT
gcacttcaacacataaagta

SEQ ID NO: 405116 - DNA, 20 bp, Artificial Sequence
  Description of Artificial Sequence: Synthetic oligonucleotide
  Target: LAMA2; (+) strand; PAM type: YTN; PAM sequence: TTG
cacttcaacacataaagtat

SEQ ID NO: 405117 - DNA, 20 bp, Artificial Sequence
  Description of Artificial Sequence: Synthetic oligonucleotide
  Target: LAMA2; (+) strand; PAM type: YTN; PAM sequence: CTT
caacacataaagtattatgc

SEQ ID NO: 405118 - DNA, 20 bp, Artificial Sequence
  Description of Artificial Sequence: Synthetic oligonucleotide
  Target: LAMA2; (+) strand; PAM type: YTN; PAM sequence: TTC
aacacataaagtattatgct

SEQ ID NO: 405119 - DNA, 20 bp, Artificial Sequence
  Description of Artificial Sequence: Synthetic oligonucleotide
  Target: LAMA2; (+) strand; PAM type: YTN; PAM sequence: TTA
tgctaatttatgattataag

SEQ ID NO: 405120 - DNA, 20 bp, Artificial Sequence
  Description of Artificial Sequence: Synthetic oligonucleotide
  Target: LAMA2; (+) strand; PAM type: YTN; PAM sequence: CTA
atttatgattataagagtat

SEQ ID NO: 405121 - DNA, 20 bp, Artificial Sequence
  Description of Artificial Sequence: Synthetic oligonucleotide
  Target: LAMA2; (+) strand; PAM type: YTN; PAM sequence: TTT
atgattataagagtattcct

SEQ ID NO: 405122 - DNA, 20 bp, Artificial Sequence
  Description of Artificial Sequence: Synthetic oligonucleotide
  Target: LAMA2; (+) strand; PAM type: YTN; PAM sequence: TTA
tgattataagagtattccta

SEQ ID NO: 405123 - DNA, 20 bp, Artificial Sequence
  Description of Artificial Sequence: Synthetic oligonucleotide
  Target: LAMA2; (+) strand; PAM type: YTN; PAM sequence: TTA
taagagtattcctatgtata

SEQ ID NO: 405124 - DNA, 20 bp, Artificial Sequence
  Description of Artificial Sequence: Synthetic oligonucleotide
  Target: LAMA2; (+) strand; PAM type: YTN; PAM sequence: TTC
ctatgtatacgtagggtgtt

SEQ ID NO: 405125 - DNA, 20 bp, Artificial Sequence
  Description of Artificial Sequence: Synthetic oligonucleotide
  Target: LAMA2; (+) strand; PAM type: YTN; PAM sequence: CTA
tgtatacgtagggtgttttg

SEQ ID NO: 405126 - DNA, 20 bp, Artificial Sequence
  Description of Artificial Sequence: Synthetic oligonucleotide
  Target: LAMA2; (+) strand; PAM type: YTN; PAM sequence: TTT
tgtaggttgcagagattcac

SEQ ID NO: 405127 - DNA, 20 bp, Artificial Sequence
  Description of Artificial Sequence: Synthetic oligonucleotide
  Target: LAMA2; (+) strand; PAM type: YTN; PAM sequence: TTT
gtaggttgcagagattcacg

SEQ ID NO: 405128 - DNA, 20 bp, Artificial Sequence
  Description of Artificial Sequence: Synthetic oligonucleotide
  Target: LAMA2; (+) strand; PAM type: YTN; PAM sequence: TTG
taggttgcagagattcacgt

SEQ ID NO: 405129 - DNA, 20 bp, Artificial Sequence
  Description of Artificial Sequence: Synthetic oligonucleotide
  Target: LAMA2; (+) strand; PAM type: YTN; PAM sequence: TTG
cagagattcacgtttacaac

SEQ ID NO: 405130 - DNA, 20 bp, Artificial Sequence
  Description of Artificial Sequence: Synthetic oligonucleotide
  Target: LAMA2; (+) strand; PAM type: YTN; PAM sequence: TTC
acgtttacaacttctcctga

SEQ ID NO: 405131 - DNA, 20 bp, Artificial Sequence
  Description of Artificial Sequence: Synthetic oligonucleotide
  Target: LAMA2; (+) strand; PAM type: YTN; PAM sequence: TTT
acaacttctcctgatgctag

SEQ ID NO: 405132 - DNA, 20 bp, Artificial Sequence
  Description of Artificial Sequence: Synthetic oligonucleotide
  Target: LAMA2; (+) strand; PAM type: YTN; PAM sequence: TTA
caacttctcctgatgctaga

SEQ ID NO: 405133 - DNA, 20 bp, Artificial Sequence
  Description of Artificial Sequence: Synthetic oligonucleotide
  Target: LAMA2; (+) strand; PAM type: YTN; PAM sequence: CTT
ctcctgatgctagaatgaat

SEQ ID NO: 405134 - DNA, 20 bp, Artificial Sequence
  Description of Artificial Sequence: Synthetic oligonucleotide
  Target: LAMA2; (+) strand; PAM type: YTN; PAM sequence: TTC
tcctgatgctagaatgaata

SEQ ID NO: 405135 - DNA, 20 bp, Artificial Sequence
  Description of Artificial Sequence: Synthetic oligonucleotide
  Target: LAMA2; (+) strand; PAM type: YTN; PAM sequence: CTC
ctgatgctagaatgaataca

SEQ ID NO: 405136 - DNA, 20 bp, Artificial Sequence
  Description of Artificial Sequence: Synthetic oligonucleotide
  Target: LAMA2; (+) strand; PAM type: YTN; PAM sequence: CTG
atgctagaatgaatacagcc

SEQ ID NO: 405137 - DNA, 20 bp, Artificial Sequence
  Description of Artificial Sequence: Synthetic oligonucleotide
  Target: LAMA2; (+) strand; PAM type: YTN; PAM sequence: CTA
gaatgaatacagcctagtcc

SEQ ID NO: 405138 - DNA, 20 bp, Artificial Sequence
  Description of Artificial Sequence: Synthetic oligonucleotide
  Target: LAMA2; (+) strand; PAM type: YTN; PAM sequence: CTA
gtcctagccatgaaaagaca

SEQ ID NO: 405139 - DNA, 20 bp, Artificial Sequence
  Description of Artificial Sequence: Synthetic oligonucleotide
  Target: LAMA2; (+) strand; PAM type: YTN; PAM sequence: CTA
gccatgaaaagacatcacca

SEQ ID NO: 405140 - DNA, 20 bp, Artificial Sequence
  Description of Artificial Sequence: Synthetic oligonucleotide
  Target: LAMA2; (+) strand; PAM type: YTN; PAM sequence: CTA
aaatagttcaaatatcaggc

SEQ ID NO: 405141 - DNA, 20 bp, Artificial Sequence
  Description of Artificial Sequence: Synthetic oligonucleotide
  Target: LAMA2; (+) strand; PAM type: YTN; PAM sequence: TTC
aaatatcaggcataataaaa

SEQ ID NO: 405142 - DNA, 20 bp, Artificial Sequence
  Description of Artificial Sequence: Synthetic oligonucleotide
  Target: LAMA2; (+) strand; PAM type: YTN; PAM sequence: CTT
taaaaaggcacatttggagt

SEQ ID NO: 405143 - DNA, 20 bp, Artificial Sequence
  Description of Artificial Sequence: Synthetic oligonucleotide
  Target: LAMA2; (+) strand; PAM type: YTN; PAM sequence: TTT
aaaaaggcacatttggagta

SEQ ID NO: 405144 - DNA, 20 bp, Artificial Sequence
  Description of Artificial Sequence: Synthetic oligonucleotide
  Target: LAMA2; (+) strand; PAM type: YTN; PAM sequence: TTA
aaaaggcacatttggagtat

SEQ ID NO: 405145 - DNA, 20 bp, Artificial Sequence
  Description of Artificial Sequence: Synthetic oligonucleotide
  Target: LAMA2; (+) strand; PAM type: YTN; PAM sequence: TTT
ggagtatactacaattaccc

SEQ ID NO: 405146 - DNA, 20 bp, Artificial Sequence
  Description of Artificial Sequence: Synthetic oligonucleotide
  Target: LAMA2; (+) strand; PAM type: YTN; PAM sequence: TTG
gagtatactacaattaccca

SEQ ID NO: 405147 - DNA, 20 bp, Artificial Sequence
  Description of Artificial Sequence: Synthetic oligonucleotide
  Target: LAMA2; (+) strand; PAM type: YTN; PAM sequence: CTA
caattacccacatcagatta

SEQ ID NO: 405148 - DNA, 20 bp, Artificial Sequence
  Description of Artificial Sequence: Synthetic oligonucleotide
  Target: LAMA2; (+) strand; PAM type: YTN; PAM sequence: TTA
cccacatcagattaagggca

SEQ ID NO: 405149 - DNA, 20 bp, Artificial Sequence
  Description of Artificial Sequence: Synthetic oligonucleotide
  Target: LAMA2; (+) strand; PAM type: YTN; PAM sequence: TTA
agggcatcatgatctgcttc

SEQ ID NO: 405150 - DNA, 20 bp, Artificial Sequence
  Description of Artificial Sequence: Synthetic oligonucleotide
  Target: LAMA2; (+) strand; PAM type: YTN; PAM sequence: CTG
cttcacagaggaggtgacat

SEQ ID NO: 405151 - DNA, 20 bp, Artificial Sequence
  Description of Artificial Sequence: Synthetic oligonucleotide
  Target: LAMA2; (+) strand; PAM type: YTN; PAM sequence: CTT
cacagaggaggtgacatttg

SEQ ID NO: 405152 - DNA, 20 bp, Artificial Sequence
  Description of Artificial Sequence: Synthetic oligonucleotide
  Target: LAMA2; (+) strand; PAM type: YTN; PAM sequence: TTC
acagaggaggtgacatttga

SEQ ID NO: 405153 - DNA, 20 bp, Artificial Sequence
  Description of Artificial Sequence: Synthetic oligonucleotide
  Target: LAMA2; (+) strand; PAM type: YTN; PAM sequence: TTT
gaaatggtcttgacctgagg

SEQ ID NO: 405154 - DNA, 20 bp, Artificial Sequence
  Description of Artificial Sequence: Synthetic oligonucleotide
  Target: LAMA2; (+) strand; PAM type: YTN; PAM sequence: TTG
aaatggtcttgacctgaggt

SEQ ID NO: 405155 - DNA, 20 bp, Artificial Sequence
  Description of Artificial Sequence: Synthetic oligonucleotide
  Target: LAMA2; (+) strand; PAM type: YTN; PAM sequence: CTT
gacctgaggtaagagtccaa

SEQ ID NO: 405156 - DNA, 20 bp, Artificial Sequence
  Description of Artificial Sequence: Synthetic oligonucleotide
  Target: LAMA2; (+) strand; PAM type: YTN; PAM sequence: TTG
acctgaggtaagagtccaaa

SEQ ID NO: 405157 - DNA, 20 bp, Artificial Sequence
  Description of Artificial Sequence: Synthetic oligonucleotide
  Target: LAMA2; (+) strand; PAM type: YTN; PAM sequence: CTG
aggtaagagtccaaaaagag

SEQ ID NO: 405158 - DNA, 20 bp, Artificial Sequence
  Description of Artificial Sequence: Synthetic oligonucleotide
  Target: LAMA2; (+) strand; PAM type: YTN; PAM sequence: TTC
taattcctgaaaccagtaag

SEQ ID NO: 405159 - DNA, 20 bp, Artificial Sequence
  Description of Artificial Sequence: Synthetic oligonucleotide
  Target: LAMA2; (+) strand; PAM type: YTN; PAM sequence: CTA
attcctgaaaccagtaagag

SEQ ID NO: 405160 - DNA, 20 bp, Artificial Sequence
  Description of Artificial Sequence: Synthetic oligonucleotide
  Target: LAMA2; (+) strand; PAM type: YTN; PAM sequence: TTC
ctgaaaccagtaagagcaaa

SEQ ID NO: 405161 - DNA, 20 bp, Artificial Sequence
  Description of Artificial Sequence: Synthetic oligonucleotide
  Target: LAMA2; (+) strand; PAM type: YTN; PAM sequence: CTG
aaaccagtaagagcaaaggg

SEQ ID NO: 405162 - DNA, 20 bp, Artificial Sequence
  Description of Artificial Sequence: Synthetic oligonucleotide
  Target: LAMA2; (+) strand; PAM type: YTN; PAM sequence: TTT
ttagaaaagaacaagtgtga

SEQ ID NO: 405163 - DNA, 20 bp, Artificial Sequence
  Description of Artificial Sequence: Synthetic oligonucleotide
  Target: LAMA2; (+) strand; PAM type: YTN; PAM sequence: TTT
tagaaaagaacaagtgtgaa

SEQ ID NO: 405164 - DNA, 20 bp, Artificial Sequence
  Description of Artificial Sequence: Synthetic oligonucleotide
  Target: LAMA2; (+) strand; PAM type: YTN; PAM sequence: TTT
agaaaagaacaagtgtgaat

SEQ ID NO: 405165 - DNA, 20 bp, Artificial Sequence
  Description of Artificial Sequence: Synthetic oligonucleotide
  Target: LAMA2; (+) strand; PAM type: YTN; PAM sequence: TTA
gaaaagaacaagtgtgaatt

SEQ ID NO: 405166 - DNA, 20 bp, Artificial Sequence
  Description of Artificial Sequence: Synthetic oligonucleotide
  Target: LAMA2; (+) strand; PAM type: YTN; PAM sequence: TTC
actcatacaagattggcaaa

SEQ ID NO: 405167 - DNA, 20 bp, Artificial Sequence
  Description of Artificial Sequence: Synthetic oligonucleotide
  Target: LAMA2; (+) strand; PAM type: YTN; PAM sequence: CTC
atacaagattggcaaatggg

SEQ ID NO: 405168 - DNA, 20 bp, Artificial Sequence
  Description of Artificial Sequence: Synthetic oligonucleotide
  Target: LAMA2; (+) strand; PAM type: YTN; PAM sequence: TTG
gcaaatgggagaatgattcg

SEQ ID NO: 405169 - DNA, 20 bp, Artificial Sequence
  Description of Artificial Sequence: Synthetic oligonucleotide
  Target: LAMA2; (+) strand; PAM type: YTN; PAM sequence: TTC
gggtaagatgcagtggccac

SEQ ID NO: 405170 - DNA, 20 bp, Artificial Sequence
  Description of Artificial Sequence: Synthetic oligonucleotide
  Target: LAMA2; (+) strand; PAM type: YTN; PAM sequence: TTC
atacacacttcttcccagca

SEQ ID NO: 405171 - DNA, 20 bp, Artificial Sequence
  Description of Artificial Sequence: Synthetic oligonucleotide
  Target: LAMA2; (+) strand; PAM type: YTN; PAM sequence: CTT
cttcccagcataatcatgtt

SEQ ID NO: 405172 - DNA, 20 bp, Artificial Sequence
  Description of Artificial Sequence: Synthetic oligonucleotide
  Target: LAMA2; (+) strand; PAM type: YTN; PAM sequence: TTC
ttcccagcataatcatgttt

SEQ ID NO: 405173 - DNA, 20 bp, Artificial Sequence
  Description of Artificial Sequence: Synthetic oligonucleotide
  Target: LAMA2; (+) strand; PAM type: YTN; PAM sequence: CTT
cccagcataatcatgttttt

SEQ ID NO: 405174 - DNA, 20 bp, Artificial Sequence
  Description of Artificial Sequence: Synthetic oligonucleotide
  Target: LAMA2; (+) strand; PAM type: YTN; PAM sequence: TTC
ccagcataatcatgtttttt

SEQ ID NO: 405175 - DNA, 20 bp, Artificial Sequence
  Description of Artificial Sequence: Synthetic oligonucleotide
  Target: LAMA2; (+) strand; PAM type: YTN; PAM sequence: TTT
ttttttctaccctataacgg

SEQ ID NO: 405176 - DNA, 20 bp, Artificial Sequence
  Description of Artificial Sequence: Synthetic oligonucleotide
  Target: LAMA2; (+) strand; PAM type: YTN; PAM sequence: TTT
tttttctaccctataacggt

SEQ ID NO: 405177 - DNA, 20 bp, Artificial Sequence
  Description of Artificial Sequence: Synthetic oligonucleotide
  Target: LAMA2; (+) strand; PAM type: YTN; PAM sequence: TTT
ttttctaccctataacggta

SEQ ID NO: 405178 - DNA, 20 bp, Artificial Sequence
  Description of Artificial Sequence: Synthetic oligonucleotide
  Target: LAMA2; (+) strand; PAM type: YTN; PAM sequence: TTT
tttctaccctataacggtag

SEQ ID NO: 405179 - DNA, 20 bp, Artificial Sequence
  Description of Artificial Sequence: Synthetic oligonucleotide
  Target: LAMA2; (+) strand; PAM type: YTN; PAM sequence: TTT
ttctaccctataacggtagc

SEQ ID NO: 405180 - DNA, 20 bp, Artificial Sequence
  Description of Artificial Sequence: Synthetic oligonucleotide
  Target: LAMA2; (+) strand; PAM type: YTN; PAM sequence: TTT
tctaccctataacggtagct

SEQ ID NO: 405181 - DNA, 20 bp, Artificial Sequence
  Description of Artificial Sequence: Synthetic oligonucleotide
  Target: LAMA2; (+) strand; PAM type: YTN; PAM sequence: TTT
ctaccctataacggtagctg

SEQ ID NO: 405182 - DNA, 20 bp, Artificial Sequence
  Description of Artificial Sequence: Synthetic oligonucleotide
  Target: LAMA2; (+) strand; PAM type: YTN; PAM sequence: TTC
taccctataacggtagctga

SEQ ID NO: 405183 - DNA, 20 bp, Artificial Sequence
  Description of Artificial Sequence: Synthetic oligonucleotide
  Target: LAMA2; (+) strand; PAM type: YTN; PAM sequence: CTA
ccctataacggtagctgaat

SEQ ID NO: 405184 - DNA, 20 bp, Artificial Sequence
  Description of Artificial Sequence: Synthetic oligonucleotide
  Target: LAMA2; (+) strand; PAM type: YTN; PAM sequence: CTA
taacggtagctgaatccaaa

SEQ ID NO: 405185 - DNA, 20 bp, Artificial Sequence
  Description of Artificial Sequence: Synthetic oligonucleotide
  Target: LAMA2; (+) strand; PAM type: YTN; PAM sequence: CTG
aatccaaagtaaaccaacat

SEQ ID NO: 405186 - DNA, 20 bp, Artificial Sequence
  Description of Artificial Sequence: Synthetic oligonucleotide
  Target: LAMA2; (+) strand; PAM type: YTN; PAM sequence: CTG
aagacaccaacctcaaagta

SEQ ID NO: 405187 - DNA, 20 bp, Artificial Sequence
  Description of Artificial Sequence: Synthetic oligonucleotide
  Target: LAMA2; (+) strand; PAM type: YTN; PAM sequence: CTC
aaagtactgtgccacaacac

SEQ ID NO: 405188 - DNA, 20 bp, Artificial Sequence
  Description of Artificial Sequence: Synthetic oligonucleotide
  Target: LAMA2; (+) strand; PAM type: YTN; PAM sequence: CTG
tgccacaacacagcctgtac

SEQ ID NO: 405189 - DNA, 20 bp, Artificial Sequence
  Description of Artificial Sequence: Synthetic oligonucleotide
  Target: LAMA2; (+) strand; PAM type: YTN; PAM sequence: CTG
tacacagtgtgcattcaccc

SEQ ID NO: 405190 - DNA, 20 bp, Artificial Sequence
  Description of Artificial Sequence: Synthetic oligonucleotide
  Target: LAMA2; (+) strand; PAM type: YTN; PAM sequence: TTC
acccatatgcctgccttcag

SEQ ID NO: 405191 - DNA, 20 bp, Artificial Sequence
  Description of Artificial Sequence: Synthetic oligonucleotide
  Target: LAMA2; (+) strand; PAM type: YTN; PAM sequence: CTG
ccttcagcttgatttagcca

SEQ ID NO: 405192 - DNA, 20 bp, Artificial Sequence
  Description of Artificial Sequence: Synthetic oligonucleotide
  Target: LAMA2; (+) strand; PAM type: YTN; PAM sequence: CTT
cagcttgatttagccaagca

SEQ ID NO: 405193 - DNA, 20 bp, Artificial Sequence
  Description of Artificial Sequence: Synthetic oligonucleotide
  Target: LAMA2; (+) strand; PAM type: YTN; PAM sequence: TTC
agcttgatttagccaagcac

SEQ ID NO: 405194 - DNA, 20 bp, Artificial Sequence
  Description of Artificial Sequence: Synthetic oligonucleotide
  Target: LAMA2; (+) strand; PAM type: YTN; PAM sequence: CTT
gatttagccaagcactctat

SEQ ID NO: 405195 - DNA, 20 bp, Artificial Sequence
  Description of Artificial Sequence: Synthetic oligonucleotide
  Target: LAMA2; (+) strand; PAM type: YTN; PAM sequence: TTG
atttagccaagcactctatc

SEQ ID NO: 405196 - DNA, 20 bp, Artificial Sequence
  Description of Artificial Sequence: Synthetic oligonucleotide
  Target: LAMA2; (+) strand; PAM type: YTN; PAM sequence: TTT
agccaagcactctatctcgg

SEQ ID NO: 405197 - DNA, 20 bp, Artificial Sequence
  Description of Artificial Sequence: Synthetic oligonucleotide
  Target: LAMA2; (+) strand; PAM type: YTN; PAM sequence: TTA
gccaagcactctatctcgga

SEQ ID NO: 405198 - DNA, 20 bp, Artificial Sequence
  Description of Artificial Sequence: Synthetic oligonucleotide
  Target: LAMA2; (+) strand; PAM type: YTN; PAM sequence: CTC
tatctcggaaatgttcgtgg

SEQ ID NO: 405199 - DNA, 20 bp, Artificial Sequence
  Description of Artificial Sequence: Synthetic oligonucleotide
  Target: LAMA2; (+) strand; PAM type: YTN; PAM sequence: CTA
tctcggaaatgttcgtggcc

SEQ ID NO: 405200 - DNA, 20 bp, Artificial Sequence
  Description of Artificial Sequence: Synthetic oligonucleotide
  Target: LAMA2; (+) strand; PAM type: YTN; PAM sequence: CTC
ggaaatgttcgtggcccacg

SEQ ID NO: 405201 - DNA, 20 bp, Artificial Sequence
  Description of Artificial Sequence: Synthetic oligonucleotide
  Target: LAMA2; (+) strand; PAM type: YTN; PAM sequence: TTC
gtggcccacgtcttttccgt

SEQ ID NO: 405202 - DNA, 20 bp, Artificial Sequence
  Description of Artificial Sequence: Synthetic oligonucleotide
  Target: LAMA2; (+) strand; PAM type: YTN; PAM sequence: CTT
ttccgtcattgtgcattttt

SEQ ID NO: 405203 - DNA, 20 bp, Artificial Sequence
  Description of Artificial Sequence: Synthetic oligonucleotide
  Target: LAMA2; (+) strand; PAM type: YTN; PAM sequence: TTT
tccgtcattgtgcatttttg

SEQ ID NO: 405204 - DNA, 20 bp, Artificial Sequence
  Description of Artificial Sequence: Synthetic oligonucleotide
  Target: LAMA2; (+) strand; PAM type: YTN; PAM sequence: TTT
ccgtcattgtgcatttttgc

SEQ ID NO: 405205 - DNA, 20 bp, Artificial Sequence
  Description of Artificial Sequence: Synthetic oligonucleotide
  Target: LAMA2; (+) strand; PAM type: YTN; PAM sequence: TTC
cgtcattgtgcatttttgcc

SEQ ID NO: 405206 - DNA, 20 bp, Artificial Sequence
  Description of Artificial Sequence: Synthetic oligonucleotide
  Target: LAMA2; (+) strand; PAM type: YTN; PAM sequence: TTG
tgcatttttgccccatcgct

SEQ ID NO: 405207 - DNA, 20 bp, Artificial Sequence
  Description of Artificial Sequence: Synthetic oligonucleotide
  Target: LAMA2; (+) strand; PAM type: YTN; PAM sequence: TTT
ttgccccatcgctaacactt

SEQ ID NO: 405208 - DNA, 20 bp, Artificial Sequence
  Description of Artificial Sequence: Synthetic oligonucleotide
  Target: LAMA2; (+) strand; PAM type: YTN; PAM sequence: TTT
tgccccatcgctaacacttg

SEQ ID NO: 405209 - DNA, 20 bp, Artificial Sequence
  Description of Artificial Sequence: Synthetic oligonucleotide
  Target: LAMA2; (+) strand; PAM type: YTN; PAM sequence: TTT
gccccatcgctaacacttgg

SEQ ID NO: 405210 - DNA, 20 bp, Artificial Sequence
  Description of Artificial Sequence: Synthetic oligonucleotide
  Target: LAMA2; (+) strand; PAM type: YTN; PAM sequence: TTG
ccccatcgctaacacttggc

SEQ ID NO: 405211 - DNA, 20 bp, Artificial Sequence
  Description of Artificial Sequence: Synthetic oligonucleotide
  Target: LAMA2; (+) strand; PAM type: YTN; PAM sequence: CTA
acacttggcagtgtcagccc

SEQ ID NO: 405212 - DNA, 20 bp, Artificial Sequence
  Description of Artificial Sequence: Synthetic oligonucleotide
  Target: LAMA2; (+) strand; PAM type: YTN; PAM sequence: CTT
ggcagtgtcagccctttctt

SEQ ID NO: 405213 - DNA, 20 bp, Artificial Sequence
  Description of Artificial Sequence: Synthetic oligonucleotide
  Target: LAMA2; (+) strand; PAM type: YTN; PAM sequence: TTG
gcagtgtcagccctttctta

SEQ ID NO: 405214 - DNA, 20 bp, Artificial Sequence
  Description of Artificial Sequence: Synthetic oligonucleotide
  Target: LAMA2; (+) strand; PAM type: YTN; PAM sequence: CTT
tcttataccccttgtcatca

SEQ ID NO: 405215 - DNA, 20 bp, Artificial Sequence
  Description of Artificial Sequence: Synthetic oligonucleotide
  Target: LAMA2; (+) strand; PAM type: YTN; PAM sequence: TTT
cttataccccttgtcatcaa

SEQ ID NO: 405216 - DNA, 20 bp, Artificial Sequence
  Description of Artificial Sequence: Synthetic oligonucleotide
  Target: LAMA2; (+) strand; PAM type: YTN; PAM sequence: TTC
ttataccccttgtcatcaaa

SEQ ID NO: 405217 - DNA, 20 bp, Artificial Sequence
  Description of Artificial Sequence: Synthetic oligonucleotide
  Target: LAMA2; (+) strand; PAM type: YTN; PAM sequence: CTT
ataccccttgtcatcaaact

SEQ ID NO: 405218 - DNA, 20 bp, Artificial Sequence
  Description of Artificial Sequence: Synthetic oligonucleotide
  Target: LAMA2; (+) strand; PAM type: YTN; PAM sequence: TTA
taccccttgtcatcaaacta

SEQ ID NO: 405219 - DNA, 20 bp, Artificial Sequence
  Description of Artificial Sequence: Synthetic oligonucleotide
  Target: LAMA2; (+) strand; PAM type: YTN; PAM sequence: CTT
gtcatcaaactatattcaca

SEQ ID NO: 405220 - DNA, 20 bp, Artificial Sequence
  Description of Artificial Sequence: Synthetic oligonucleotide
  Target: LAMA2; (+) strand; PAM type: YTN; PAM sequence: TTG
tcatcaaactatattcacat

SEQ ID NO: 405221 - DNA, 20 bp, Artificial Sequence
  Description of Artificial Sequence: Synthetic oligonucleotide
  Target: LAMA2; (+) strand; PAM type: YTN; PAM sequence: CTA
tattcacattttccttttaa

SEQ ID NO: 405222 - DNA, 20 bp, Artificial Sequence
  Description of Artificial Sequence: Synthetic oligonucleotide
  Target: LAMA2; (+) strand; PAM type: YTN; PAM sequence: TTC
acattttccttttaaggtga

SEQ ID NO: 405223 - DNA, 20 bp, Artificial Sequence
  Description of Artificial Sequence: Synthetic oligonucleotide
  Target: LAMA2; (+) strand; PAM type: YTN; PAM sequence: TTT
tccttttaaggtgaagtgat

SEQ ID NO: 405224 - DNA, 20 bp, Artificial Sequence
  Description of Artificial Sequence: Synthetic oligonucleotide
  Target: LAMA2; (+) strand; PAM type: YTN; PAM sequence: TTT
ccttttaaggtgaagtgata

SEQ ID NO: 405225 - DNA, 20 bp, Artificial Sequence
  Description of Artificial Sequence: Synthetic oligonucleotide
  Target: LAMA2; (+) strand; PAM type: YTN; PAM sequence: TTC
cttttaaggtgaagtgatat

SEQ ID NO: 405226 - DNA, 20 bp, Artificial Sequence
  Description of Artificial Sequence: Synthetic oligonucleotide
  Target: LAMA2; (+) strand; PAM type: YTN; PAM sequence: CTT
ttaaggtgaagtgatatgta

SEQ ID NO: 405227 - DNA, 20 bp, Artificial Sequence
  Description of Artificial Sequence: Synthetic oligonucleotide
  Target: LAMA2; (+) strand; PAM type: YTN; PAM sequence: TTT
taaggtgaagtgatatgtat

SEQ ID NO: 405228 - DNA, 20 bp, Artificial Sequence
  Description of Artificial Sequence: Synthetic oligonucleotide
  Target: LAMA2; (+) strand; PAM type: YTN; PAM sequence: TTT
aaggtgaagtgatatgtata

SEQ ID NO: 405229 - DNA, 20 bp, Artificial Sequence
  Description of Artificial Sequence: Synthetic oligonucleotide
  Target: LAMA2; (+) strand; PAM type: YTN; PAM sequence: TTA
aggtgaagtgatatgtatac

SEQ ID NO: 405230 - DNA, 20 bp, Artificial Sequence
  Description of Artificial Sequence: Synthetic oligonucleotide
  Target: LAMA2; (+) strand; PAM type: YTN; PAM sequence: CTG
aaataatcctatatttttta

SEQ ID NO: 405231 - DNA, 20 bp, Artificial Sequence
  Description of Artificial Sequence: Synthetic oligonucleotide
  Target: LAMA2; (+) strand; PAM type: YTN; PAM sequence: CTA
tattttttaatgttttagtg

SEQ ID NO: 405232 - DNA, 20 bp, Artificial Sequence
  Description of Artificial Sequence: Synthetic oligonucleotide
  Target: LAMA2; (+) strand; PAM type: YTN; PAM sequence: TTT
tttaatgttttagtgtatct

SEQ ID NO: 405233 - DNA, 20 bp, Artificial Sequence
  Description of Artificial Sequence: Synthetic oligonucleotide
  Target: LAMA2; (+) strand; PAM type: YTN; PAM sequence: TTT
ttaatgttttagtgtatctt

SEQ ID NO: 405234 - DNA, 20 bp, Artificial Sequence
  Description of Artificial Sequence: Synthetic oligonucleotide
  Target: LAMA2; (+) strand; PAM type: YTN; PAM sequence: TTT
taatgttttagtgtatcttt

SEQ ID NO: 405235 - DNA, 20 bp, Artificial Sequence
  Description of Artificial Sequence: Synthetic oligonucleotide
  Target: LAMA2; (+) strand; PAM type: YTN; PAM sequence: TTT
aatgttttagtgtatctttt

SEQ ID NO: 405236 - DNA, 20 bp, Artificial Sequence
  Description of Artificial Sequence: Synthetic oligonucleotide
  Target: LAMA2; (+) strand; PAM type: YTN; PAM sequence: TTA
atgttttagtgtatcttttt

SEQ ID NO: 405237 - DNA, 20 bp, Artificial Sequence
  Description of Artificial Sequence: Synthetic oligonucleotide
  Target: LAMA2; (+) strand; PAM type: YTN; PAM sequence: TTT
tagtgtatctttttgagctg

SEQ ID NO: 405238 - DNA, 20 bp, Artificial Sequence
  Description of Artificial Sequence: Synthetic oligonucleotide
  Target: LAMA2; (+) strand; PAM type: YTN; PAM sequence: TTT
agtgtatctttttgagctgt

SEQ ID NO: 405239 - DNA, 20 bp, Artificial Sequence
  Description of Artificial Sequence: Synthetic oligonucleotide
  Target: LAMA2; (+) strand; PAM type: YTN; PAM sequence: TTA
gtgtatctttttgagctgtg

SEQ ID NO: 405240 - DNA, 20 bp, Artificial Sequence
  Description of Artificial Sequence: Synthetic oligonucleotide
  Target: LAMA2; (+) strand; PAM type: YTN; PAM sequence: CTT
tttgagctgtgctaatactt

SEQ ID NO: 405241 - DNA, 20 bp, Artificial Sequence
  Description of Artificial Sequence: Synthetic oligonucleotide
  Target: LAMA2; (+) strand; PAM type: YTN; PAM sequence: TTT
ttgagctgtgctaatacttt

SEQ ID NO: 405242 - DNA, 20 bp, Artificial Sequence
  Description of Artificial Sequence: Synthetic oligonucleotide
  Target: LAMA2; (+) strand; PAM type: YTN; PAM sequence: TTT
tgagctgtgctaatactttg

SEQ ID NO: 405243 - DNA, 20 bp, Artificial Sequence
  Description of Artificial Sequence: Synthetic oligonucleotide
  Target: LAMA2; (+) strand; PAM type: YTN; PAM sequence: TTT
gagctgtgctaatactttga

SEQ ID NO: 405244 - DNA, 20 bp, Artificial Sequence
  Description of Artificial Sequence: Synthetic oligonucleotide
  Target: LAMA2; (+) strand; PAM type: YTN; PAM sequence: TTG
agctgtgctaatactttgat

SEQ ID NO: 405245 - DNA, 20 bp, Artificial Sequence
  Description of Artificial Sequence: Synthetic oligonucleotide
  Target: LAMA2; (+) strand; PAM type: YTN; PAM sequence: CTG
tgctaatactttgatcagga

SEQ ID NO: 405246 - DNA, 20 bp, Artificial Sequence
  Description of Artificial Sequence: Synthetic oligonucleotide
  Target: LAMA2; (+) strand; PAM type: YTN; PAM sequence: CTA
atactttgatcaggattgtt

SEQ ID NO: 405247 - DNA, 20 bp, Artificial Sequence
  Description of Artificial Sequence: Synthetic oligonucleotide
  Target: LAMA2; (+) strand; PAM type: YTN; PAM sequence: CTT
tgatcaggattgttattgtt

SEQ ID NO: 405248 - DNA, 20 bp, Artificial Sequence
  Description of Artificial Sequence: Synthetic oligonucleotide
  Target: LAMA2; (+) strand; PAM type: YTN; PAM sequence: TTT
gatcaggattgttattgttt

SEQ ID NO: 405249 - DNA, 20 bp, Artificial Sequence
  Description of Artificial Sequence: Synthetic oligonucleotide
  Target: LAMA2; (+) strand; PAM type: YTN; PAM sequence: TTG
atcaggattgttattgtttt

SEQ ID NO: 405250 - DNA, 20 bp, Artificial Sequence
  Description of Artificial Sequence: Synthetic oligonucleotide
  Target: LAMA2; (+) strand; PAM type: YTN; PAM sequence: TTG
ttattgttttgtgagttctc

SEQ ID NO: 405251 - DNA, 20 bp, Artificial Sequence
  Description of Artificial Sequence: Synthetic oligonucleotide
  Target: LAMA2; (+) strand; PAM type: YTN; PAM sequence: TTA
ttgttttgtgagttctctaa

SEQ ID NO: 405252 - DNA, 20 bp, Artificial Sequence
  Description of Artificial Sequence: Synthetic oligonucleotide
  Target: LAMA2; (+) strand; PAM type: YTN; PAM sequence: TTG
ttttgtgagttctctaatta

SEQ ID NO: 405253 - DNA, 20 bp, Artificial Sequence
  Description of Artificial Sequence: Synthetic oligonucleotide
  Target: LAMA2; (+) strand; PAM type: YTN; PAM sequence: TTT
tgtgagttctctaattacac

SEQ ID NO: 405254 - DNA, 20 bp, Artificial Sequence
  Description of Artificial Sequence: Synthetic oligonucleotide
  Target: LAMA2; (+) strand; PAM type: YTN; PAM sequence: TTT
gtgagttctctaattacaca

SEQ ID NO: 405255 - DNA, 20 bp, Artificial Sequence
  Description of Artificial Sequence: Synthetic oligonucleotide
  Target: LAMA2; (+) strand; PAM type: YTN; PAM sequence: TTG
tgagttctctaattacacac

SEQ ID NO: 405256 - DNA, 20 bp, Artificial Sequence
  Description of Artificial Sequence: Synthetic oligonucleotide
  Target: LAMA2; (+) strand; PAM type: YTN; PAM sequence: TTC
tctaattacacacttgtgta

SEQ ID NO: 405257 - DNA, 20 bp, Artificial Sequence
  Description of Artificial Sequence: Synthetic oligonucleotide
  Target: LAMA2; (+) strand; PAM type: YTN; PAM sequence: CTC
taattacacacttgtgtaag

SEQ ID NO: 405258 - DNA, 20 bp, Artificial Sequence
  Description of Artificial Sequence: Synthetic oligonucleotide
  Target: LAMA2; (+) strand; PAM type: YTN; PAM sequence: CTA
attacacacttgtgtaagtt

SEQ ID NO: 405259 - DNA, 20 bp, Artificial Sequence
  Description of Artificial Sequence: Synthetic oligonucleotide
  Target: LAMA2; (+) strand; PAM type: YTN; PAM sequence: TTA
cacacttgtgtaagttttta

SEQ ID NO: 405260 - DNA, 20 bp, Artificial Sequence
  Description of Artificial Sequence: Synthetic oligonucleotide
  Target: LAMA2; (+) strand; PAM type: YTN; PAM sequence: CTT
gtgtaagtttttagcaggtc

SEQ ID NO: 405261 - DNA, 20 bp, Artificial Sequence
  Description of Artificial Sequence: Synthetic oligonucleotide
  Target: LAMA2; (+) strand; PAM type: YTN; PAM sequence: TTG
tgtaagtttttagcaggtca

SEQ ID NO: 405262 - DNA, 20 bp, Artificial Sequence
  Description of Artificial Sequence: Synthetic oligonucleotide
  Target: LAMA2; (+) strand; PAM type: YTN; PAM sequence: TTT
ttagcaggtcagccccaacc

SEQ ID NO: 405263 - DNA, 20 bp, Artificial Sequence
  Description of Artificial Sequence: Synthetic oligonucleotide
  Target: LAMA2; (+) strand; PAM type: YTN; PAM sequence: TTT
tagcaggtcagccccaaccc

SEQ ID NO: 405264 - DNA, 20 bp, Artificial Sequence
  Description of Artificial Sequence: Synthetic oligonucleotide
  Target: LAMA2; (+) strand; PAM type: YTN; PAM sequence: TTT
agcaggtcagccccaaccct

SEQ ID NO: 405265 - DNA, 20 bp, Artificial Sequence
  Description of Artificial Sequence: Synthetic oligonucleotide
  Target: LAMA2; (+) strand; PAM type: YTN; PAM sequence: TTA
gcaggtcagccccaacccta

SEQ ID NO: 405266 - DNA, 20 bp, Artificial Sequence
  Description of Artificial Sequence: Synthetic oligonucleotide
  Target: LAMA2; (+) strand; PAM type: YTN; PAM sequence: CTA
ttttcccataagccctgtta

SEQ ID NO: 405267 - DNA, 20 bp, Artificial Sequence
  Description of Artificial Sequence: Synthetic oligonucleotide
  Target: LAMA2; (+) strand; PAM type: YTN; PAM sequence: TTT
tcccataagccctgttattt

SEQ ID NO: 405268 - DNA, 20 bp, Artificial Sequence
  Description of Artificial Sequence: Synthetic oligonucleotide
  Target: LAMA2; (+) strand; PAM type: YTN; PAM sequence: TTT
cccataagccctgttatttg

SEQ ID NO: 405269 - DNA, 20 bp, Artificial Sequence
  Description of Artificial Sequence: Synthetic oligonucleotide
  Target: LAMA2; (+) strand; PAM type: YTN; PAM sequence: TTC
ccataagccctgttatttgt

SEQ ID NO: 405270 - DNA, 20 bp, Artificial Sequence
  Description of Artificial Sequence: Synthetic oligonucleotide
  Target: LAMA2; (+) strand; PAM type: YTN; PAM sequence: CTG
ttatttgtaagaataatttt

SEQ ID NO: 405271 - DNA, 20 bp, Artificial Sequence
  Description of Artificial Sequence: Synthetic oligonucleotide
  Target: LAMA2; (+) strand; PAM type: YTN; PAM sequence: TTA
tttgtaagaataatttttat

SEQ ID NO: 405272 - DNA, 20 bp, Artificial Sequence
  Description of Artificial Sequence: Synthetic oligonucleotide
  Target: LAMA2; (+) strand; PAM type: YTN; PAM sequence: TTT
gtaagaataatttttataga

SEQ ID NO: 405273 - DNA, 20 bp, Artificial Sequence
  Description of Artificial Sequence: Synthetic oligonucleotide
  Target: LAMA2; (+) strand; PAM type: YTN; PAM sequence: TTG
taagaataatttttatagaa

SEQ ID NO: 405274 - DNA, 20 bp, Artificial Sequence
  Description of Artificial Sequence: Synthetic oligonucleotide
  Target: LAMA2; (+) strand; PAM type: YTN; PAM sequence: TTT
ttatagaactcctggtgttt

SEQ ID NO: 405275 - DNA, 20 bp, Artificial Sequence
  Description of Artificial Sequence: Synthetic oligonucleotide
  Target: LAMA2; (+) strand; PAM type: YTN; PAM sequence: TTT
tatagaactcctggtgtttg

SEQ ID NO: 405276 - DNA, 20 bp, Artificial Sequence
  Description of Artificial Sequence: Synthetic oligonucleotide
  Target: LAMA2; (+) strand; PAM type: YTN; PAM sequence: TTT
atagaactcctggtgtttgt

SEQ ID NO: 405277 - DNA, 20 bp, Artificial Sequence
  Description of Artificial Sequence: Synthetic oligonucleotide
  Target: LAMA2; (+) strand; PAM type: YTN; PAM sequence: TTA
tagaactcctggtgtttgtt

SEQ ID NO: 405278 - DNA, 20 bp, Artificial Sequence
  Description of Artificial Sequence: Synthetic oligonucleotide
  Target: LAMA2; (+) strand; PAM type: YTN; PAM sequence: CTC
ctggtgtttgtttgtttgtt

SEQ ID NO: 405279 - DNA, 20 bp, Artificial Sequence
  Description of Artificial Sequence: Synthetic oligonucleotide
  Target: LAMA2; (+) strand; PAM type: YTN; PAM sequence: CTG
gtgtttgtttgtttgtttgt

SEQ ID NO: 405280 - DNA, 20 bp, Artificial Sequence
  Description of Artificial Sequence: Synthetic oligonucleotide
  Target: LAMA2; (+) strand; PAM type: YTN; PAM sequence: TTT
gtttgtttgtttgtttgttt

SEQ ID NO: 405281 - DNA, 20 bp, Artificial Sequence
  Description of Artificial Sequence: Synthetic oligonucleotide
  Target: LAMA2; (+) strand; PAM type: YTN; PAM sequence: TTG
tttgtttgtttgtttgttta

SEQ ID NO: 405282 - DNA, 20 bp, Artificial Sequence
  Description of Artificial Sequence: Synthetic oligonucleotide
  Target: LAMA2; (+) strand; PAM type: YTN; PAM sequence: TTT
gtttgtttgtttgtttattt

SEQ ID NO: 405283 - DNA, 20 bp, Artificial Sequence
  Description of Artificial Sequence: Synthetic oligonucleotide
  Target: LAMA2; (+) strand; PAM type: YTN; PAM sequence: TTG
tttgtttgtttgtttatttg

SEQ ID NO: 405284 - DNA, 20 bp, Artificial Sequence
  Description of Artificial Sequence: Synthetic oligonucleotide
  Target: LAMA2; (+) strand; PAM type: YTN; PAM sequence: TTT
gtttgtttgtttatttgttg

SEQ ID NO: 405285 - DNA, 20 bp, Artificial Sequence
  Description of Artificial Sequence: Synthetic oligonucleotide
  Target: LAMA2; (+) strand; PAM type: YTN; PAM sequence: TTG
tttgtttgtttatttgttgc

SEQ ID NO: 405286 - DNA, 20 bp, Artificial Sequence
  Description of Artificial Sequence: Synthetic oligonucleotide
  Target: LAMA2; (+) strand; PAM type: YTN; PAM sequence: TTT
gtttgtttatttgttgcttt

SEQ ID NO: 405287 - DNA, 20 bp, Artificial Sequence
  Description of Artificial Sequence: Synthetic oligonucleotide
  Target: LAMA2; (+) strand; PAM type: YTN; PAM sequence: TTG
tttgtttatttgttgctttc

SEQ ID NO: 405288 - DNA, 20 bp, Artificial Sequence
  Description of Artificial Sequence: Synthetic oligonucleotide
  Target: LAMA2; (+) strand; PAM type: YTN; PAM sequence: TTT
gtttatttgttgctttcagg

SEQ ID NO: 405289 - DNA, 20 bp, Artificial Sequence
  Description of Artificial Sequence: Synthetic oligonucleotide
  Target: LAMA2; (+) strand; PAM type: YTN; PAM sequence: TTG
tttatttgttgctttcagga

SEQ ID NO: 405290 - DNA, 20 bp, Artificial Sequence
  Description of Artificial Sequence: Synthetic oligonucleotide
  Target: LAMA2; (+) strand; PAM type: YTN; PAM sequence: TTT
atttgttgctttcaggaaaa

SEQ ID NO: 405291 - DNA, 20 bp, Artificial Sequence
  Description of Artificial Sequence: Synthetic oligonucleotide
  Target: LAMA2; (+) strand; PAM type: YTN; PAM sequence: TTA
tttgttgctttcaggaaaac

SEQ ID NO: 405292 - DNA, 20 bp, Artificial Sequence
  Description of Artificial Sequence: Synthetic oligonucleotide
  Target: LAMA2; (+) strand; PAM type: YTN; PAM sequence: TTT
gttgctttcaggaaaacact

SEQ ID NO: 405293 - DNA, 20 bp, Artificial Sequence
  Description of Artificial Sequence: Synthetic oligonucleotide
  Target: LAMA2; (+) strand; PAM type: YTN; PAM sequence: TTG
ttgctttcaggaaaacactt

SEQ ID NO: 405294 - DNA, 20 bp, Artificial Sequence
  Description of Artificial Sequence: Synthetic oligonucleotide
  Target: LAMA2; (+) strand; PAM type: YTN; PAM sequence: TTG
ctttcaggaaaacacttatc

SEQ ID NO: 405295 - DNA, 20 bp, Artificial Sequence
  Description of Artificial Sequence: Synthetic oligonucleotide
  Target: LAMA2; (+) strand; PAM type: YTN; PAM sequence: CTT
tcaggaaaacacttatcaca

SEQ ID NO: 405296 - DNA, 20 bp, Artificial Sequence
  Description of Artificial Sequence: Synthetic oligonucleotide
  Target: LAMA2; (+) strand; PAM type: YTN; PAM sequence: TTT
caggaaaacacttatcacat

SEQ ID NO: 405297 - DNA, 20 bp, Artificial Sequence
  Description of Artificial Sequence: Synthetic oligonucleotide
  Target: LAMA2; (+) strand; PAM type: YTN; PAM sequence: TTC
aggaaaacacttatcacatt

SEQ ID NO: 405298 - DNA, 20 bp, Artificial Sequence
  Description of Artificial Sequence: Synthetic oligonucleotide
  Target: LAMA2; (+) strand; PAM type: YTN; PAM sequence: CTT
atcacatttgaacataaaga

SEQ ID NO: 405299 - DNA, 20 bp, Artificial Sequence
  Description of Artificial Sequence: Synthetic oligonucleotide
  Target: LAMA2; (+) strand; PAM type: YTN; PAM sequence: TTA
tcacatttgaacataaagag

SEQ ID NO: 405300 - DNA, 20 bp, Artificial Sequence
  Description of Artificial Sequence: Synthetic oligonucleotide
  Target: LAMA2; (+) strand; PAM type: YTN; PAM sequence: TTT
gaacataaagagcaatcatt

SEQ ID NO: 405301 - DNA, 20 bp, Artificial Sequence
  Description of Artificial Sequence: Synthetic oligonucleotide
  Target: LAMA2; (+) strand; PAM type: YTN; PAM sequence: TTG
aacataaagagcaatcattc

SEQ ID NO: 405302 - DNA, 20 bp, Artificial Sequence
  Description of Artificial Sequence: Synthetic oligonucleotide
  Target: LAMA2; (+) strand; PAM type: YTN; PAM sequence: TTC
ctactaaagagcaggagtga

SEQ ID NO: 405303 - DNA, 20 bp, Artificial Sequence
  Description of Artificial Sequence: Synthetic oligonucleotide
  Target: LAMA2; (+) strand; PAM type: YTN; PAM sequence: CTA
ctaaagagcaggagtgattt

SEQ ID NO: 405304 - DNA, 20 bp, Artificial Sequence
  Description of Artificial Sequence: Synthetic oligonucleotide
  Target: LAMA2; (+) strand; PAM type: YTN; PAM sequence: CTA
aagagcaggagtgatttcat

SEQ ID NO: 405305 - DNA, 20 bp, Artificial Sequence
  Description of Artificial Sequence: Synthetic oligonucleotide
  Target: LAMA2; (+) strand; PAM type: YTN; PAM sequence: TTT
catggagaagatgtaaaagt

SEQ ID NO: 405306 - DNA, 20 bp, Artificial Sequence
  Description of Artificial Sequence: Synthetic oligonucleotide
  Target: LAMA2; (+) strand; PAM type: YTN; PAM sequence: TTC
atggagaagatgtaaaagtg

SEQ ID NO: 405307 - DNA, 20 bp, Artificial Sequence
  Description of Artificial Sequence: Synthetic oligonucleotide
  Target: LAMA2; (+) strand; PAM type: YTN; PAM sequence: CTA
aaagaggtagactaagaaaa

SEQ ID NO: 405308 - DNA, 20 bp, Artificial Sequence
  Description of Artificial Sequence: Synthetic oligonucleotide
  Target: LAMA2; (+) strand; PAM type: YTN; PAM sequence: CTA
agaaaatgtcataaagacct

SEQ ID NO: 405309 - DNA, 20 bp, Artificial Sequence
  Description of Artificial Sequence: Synthetic oligonucleotide
  Target: LAMA2; (+) strand; PAM type: YTN; PAM sequence: CTT
agaatgtcagttttagaaat

SEQ ID NO: 405310 - DNA, 20 bp, Artificial Sequence
  Description of Artificial Sequence: Synthetic oligonucleotide
  Target: LAMA2; (+) strand; PAM type: YTN; PAM sequence: TTA
gaatgtcagttttagaaatt

SEQ ID NO: 405311 - DNA, 20 bp, Artificial Sequence
  Description of Artificial Sequence: Synthetic oligonucleotide
  Target: LAMA2; (+) strand; PAM type: YTN; PAM sequence: TTT
tagaaatttgcatttattca

SEQ ID NO: 405312 - DNA, 20 bp, Artificial Sequence
  Description of Artificial Sequence: Synthetic oligonucleotide
  Target: LAMA2; (+) strand; PAM type: YTN; PAM sequence: TTT
agaaatttgcatttattcaa

SEQ ID NO: 405313 - DNA, 20 bp, Artificial Sequence
  Description of Artificial Sequence: Synthetic oligonucleotide
  Target: LAMA2; (+) strand; PAM type: YTN; PAM sequence: TTA
gaaatttgcatttattcaat

SEQ ID NO: 405314 - DNA, 20 bp, Artificial Sequence
  Description of Artificial Sequence: Synthetic oligonucleotide
  Target: LAMA2; (+) strand; PAM type: YTN; PAM sequence: TTT
gcatttattcaatagtcagt

SEQ ID NO: 405315 - DNA, 20 bp, Artificial Sequence
  Description of Artificial Sequence: Synthetic oligonucleotide
  Target: LAMA2; (+) strand; PAM type: YTN; PAM sequence: TTG
catttattcaatagtcagta

SEQ ID NO: 405316 - DNA, 20 bp, Artificial Sequence
  Description of Artificial Sequence: Synthetic oligonucleotide
  Target: LAMA2; (+) strand; PAM type: YTN; PAM sequence: TTT
attcaatagtcagtagaaga

SEQ ID NO: 405317 - DNA, 20 bp, Artificial Sequence
  Description of Artificial Sequence: Synthetic oligonucleotide
  Target: LAMA2; (+) strand; PAM type: YTN; PAM sequence: TTA
ttcaatagtcagtagaagag

SEQ ID NO: 405318 - DNA, 20 bp, Artificial Sequence
  Description of Artificial Sequence: Synthetic oligonucleotide
  Target: LAMA2; (+) strand; PAM type: YTN; PAM sequence: TTC
aatagtcagtagaagagata

SEQ ID NO: 405319 - DNA, 20 bp, Artificial Sequence
  Description of Artificial Sequence: Synthetic oligonucleotide
  Target: LAMA2; (+) strand; PAM type: YTN; PAM sequence: TTG
ttgttatgctttagaaagag

SEQ ID NO: 405320 - DNA, 20 bp, Artificial Sequence
  Description of Artificial Sequence: Synthetic oligonucleotide
  Target: LAMA2; (+) strand; PAM type: YTN; PAM sequence: TTG
ttatgctttagaaagagtaa

SEQ ID NO: 405321 - DNA, 20 bp, Artificial Sequence
  Description of Artificial Sequence: Synthetic oligonucleotide
  Target: LAMA2; (+) strand; PAM type: YTN; PAM sequence: TTA
tgctttagaaagagtaatct

SEQ ID NO: 405322 - DNA, 20 bp, Artificial Sequence
  Description of Artificial Sequence: Synthetic oligonucleotide
  Target: LAMA2; (+) strand; PAM type: YTN; PAM sequence: CTT
tagaaagagtaatctgtcaa

SEQ ID NO: 405323 - DNA, 20 bp, Artificial Sequence
  Description of Artificial Sequence: Synthetic oligonucleotide
  Target: LAMA2; (+) strand; PAM type: YTN; PAM sequence: TTT
agaaagagtaatctgtcaaa

SEQ ID NO: 405324 - DNA, 20 bp, Artificial Sequence
  Description of Artificial Sequence: Synthetic oligonucleotide
  Target: LAMA2; (+) strand; PAM type: YTN; PAM sequence: TTA
gaaagagtaatctgtcaaag

SEQ ID NO: 405325 - DNA, 20 bp, Artificial Sequence
  Description of Artificial Sequence: Synthetic oligonucleotide
  Target: LAMA2; (+) strand; PAM type: YTN; PAM sequence: CTG
tcaaagatatttttaaaagt

SEQ ID NO: 405326 - DNA, 20 bp, Artificial Sequence
  Description of Artificial Sequence: Synthetic oligonucleotide
  Target: LAMA2; (+) strand; PAM type: YTN; PAM sequence: TTT
ttaaaagtgtatcttatttt

SEQ ID NO: 405327 - DNA, 20 bp, Artificial Sequence
  Description of Artificial Sequence: Synthetic oligonucleotide
  Target: LAMA2; (+) strand; PAM type: YTN; PAM sequence: TTT
taaaagtgtatcttattttt

SEQ ID NO: 405328 - DNA, 20 bp, Artificial Sequence
  Description of Artificial Sequence: Synthetic oligonucleotide
  Target: LAMA2; (+) strand; PAM type: YTN; PAM sequence: TTT
aaaagtgtatcttatttttc

SEQ ID NO: 405329 - DNA, 20 bp, Artificial Sequence
  Description of Artificial Sequence: Synthetic oligonucleotide
  Target: LAMA2; (+) strand; PAM type: YTN; PAM sequence: TTA
aaagtgtatcttatttttct

SEQ ID NO: 405330 - DNA, 20 bp, Artificial Sequence
  Description of Artificial Sequence: Synthetic oligonucleotide
  Target: LAMA2; (+) strand; PAM type: YTN; PAM sequence: CTT
atttttctcatgcttctaaa

SEQ ID NO: 405331 - DNA, 20 bp, Artificial Sequence
  Description of Artificial Sequence: Synthetic oligonucleotide
  Target: LAMA2; (+) strand; PAM type: YTN; PAM sequence: TTA
tttttctcatgcttctaaaa

SEQ ID NO: 405332 - DNA, 20 bp, Artificial Sequence
  Description of Artificial Sequence: Synthetic oligonucleotide
  Target: LAMA2; (+) strand; PAM type: YTN; PAM sequence: TTT
ttctcatgcttctaaaattc

SEQ ID NO: 405333 - DNA, 20 bp, Artificial Sequence
  Description of Artificial Sequence: Synthetic oligonucleotide
  Target: LAMA2; (+) strand; PAM type: YTN; PAM sequence: TTT
tctcatgcttctaaaattca

SEQ ID NO: 405334 - DNA, 20 bp, Artificial Sequence
  Description of Artificial Sequence: Synthetic oligonucleotide
  Target: LAMA2; (+) strand; PAM type: YTN; PAM sequence: TTT
ctcatgcttctaaaattcac

SEQ ID NO: 405335 - DNA, 20 bp, Artificial Sequence
  Description of Artificial Sequence: Synthetic oligonucleotide
  Target: LAMA2; (+) strand; PAM type: YTN; PAM sequence: TTC
tcatgcttctaaaattcaca

SEQ ID NO: 405336 - DNA, 20 bp, Artificial Sequence
  Description of Artificial Sequence: Synthetic oligonucleotide
  Target: LAMA2; (+) strand; PAM type: YTN; PAM sequence: CTC
atgcttctaaaattcacatt

SEQ ID NO: 405337 - DNA, 20 bp, Artificial Sequence
  Description of Artificial Sequence: Synthetic oligonucleotide
  Target: LAMA2; (+) strand; PAM type: YTN; PAM sequence: CTT
ctaaaattcacattaagatt

SEQ ID NO: 405338 - DNA, 20 bp, Artificial Sequence
  Description of Artificial Sequence: Synthetic oligonucleotide
  Target: LAMA2; (+) strand; PAM type: YTN; PAM sequence: TTC
taaaattcacattaagatta

SEQ ID NO: 405339 - DNA, 20 bp, Artificial Sequence
  Description of Artificial Sequence: Synthetic oligonucleotide
  Target: LAMA2; (+) strand; PAM type: YTN; PAM sequence: CTA
aaattcacattaagattaaa

SEQ ID NO: 405340 - DNA, 20 bp, Artificial Sequence
  Description of Artificial Sequence: Synthetic oligonucleotide
  Target: LAMA2; (+) strand; PAM type: YTN; PAM sequence: TTC
acattaagattaaagtaagg

SEQ ID NO: 405341 - DNA, 20 bp, Artificial Sequence
  Description of Artificial Sequence: Synthetic oligonucleotide
  Target: LAMA2; (+) strand; PAM type: YTN; PAM sequence: TTA
agattaaagtaaggggaaaa

SEQ ID NO: 405342 - DNA, 20 bp, Artificial Sequence
  Description of Artificial Sequence: Synthetic oligonucleotide
  Target: LAMA2; (+) strand; PAM type: YTN; PAM sequence: TTA
aagtaaggggaaaaatctgc

SEQ ID NO: 405343 - DNA, 20 bp, Artificial Sequence
  Description of Artificial Sequence: Synthetic oligonucleotide
  Target: LAMA2; (+) strand; PAM type: YTN; PAM sequence: CTG
ctgcaagtaaaatttagtta

SEQ ID NO: 405344 - DNA, 20 bp, Artificial Sequence
  Description of Artificial Sequence: Synthetic oligonucleotide
  Target: LAMA2; (+) strand; PAM type: YTN; PAM sequence: CTG
caagtaaaatttagttagct

SEQ ID NO: 405345 - DNA, 20 bp, Artificial Sequence
  Description of Artificial Sequence: Synthetic oligonucleotide
  Target: LAMA2; (+) strand; PAM type: YTN; PAM sequence: TTT
agttagctgagcattgaaat

SEQ ID NO: 405346 - DNA, 20 bp, Artificial Sequence
  Description of Artificial Sequence: Synthetic oligonucleotide
  Target: LAMA2; (+) strand; PAM type: YTN; PAM sequence: TTA
gttagctgagcattgaaatg

SEQ ID NO: 405347 - DNA, 20 bp, Artificial Sequence
  Description of Artificial Sequence: Synthetic oligonucleotide
  Target: LAMA2; (+) strand; PAM type: YTN; PAM sequence: TTA
gctgagcattgaaatggtga

SEQ ID NO: 405348 - DNA, 20 bp, Artificial Sequence
  Description of Artificial Sequence: Synthetic oligonucleotide
  Target: LAMA2; (+) strand; PAM type: YTN; PAM sequence: CTG
agcattgaaatggtgatatt

SEQ ID NO: 405349 - DNA, 20 bp, Artificial Sequence
  Description of Artificial Sequence: Synthetic oligonucleotide
  Target: LAMA2; (+) strand; PAM type: YTN; PAM sequence: TTG
aaatggtgatattttaatag

SEQ ID NO: 405350 - DNA, 20 bp, Artificial Sequence
  Description of Artificial Sequence: Synthetic oligonucleotide
  Target: LAMA2; (+) strand; PAM type: YTN; PAM sequence: TTT
taatagacttagccccaata

SEQ ID NO: 405351 - DNA, 20 bp, Artificial Sequence
  Description of Artificial Sequence: Synthetic oligonucleotide
  Target: LAMA2; (+) strand; PAM type: YTN; PAM sequence: TTT
aatagacttagccccaatat

SEQ ID NO: 405352 - DNA, 20 bp, Artificial Sequence
  Description of Artificial Sequence: Synthetic oligonucleotide
  Target: LAMA2; (+) strand; PAM type: YTN; PAM sequence: TTA
atagacttagccccaatatt

SEQ ID NO: 405353 - DNA, 20 bp, Artificial Sequence
  Description of Artificial Sequence: Synthetic oligonucleotide
  Target: LAMA2; (+) strand; PAM type: YTN; PAM sequence: CTT
agccccaatattcacctaga

SEQ ID NO: 405354 - DNA, 20 bp, Artificial Sequence
  Description of Artificial Sequence: Synthetic oligonucleotide
  Target: LAMA2; (+) strand; PAM type: YTN; PAM sequence: TTA
gccccaatattcacctagaa

SEQ ID NO: 405355 - DNA, 20 bp, Artificial Sequence
  Description of Artificial Sequence: Synthetic oligonucleotide
  Target: LAMA2; (+) strand; PAM type: YTN; PAM sequence: TTC
acctagaacgtagctgctcc

SEQ ID NO: 405356 - DNA, 20 bp, Artificial Sequence
  Description of Artificial Sequence: Synthetic oligonucleotide
  Target: LAMA2; (+) strand; PAM type: YTN; PAM sequence: CTA
gaacgtagctgctccaaaat

SEQ ID NO: 405357 - DNA, 20 bp, Artificial Sequence
  Description of Artificial Sequence: Synthetic oligonucleotide
  Target: LAMA2; (+) strand; PAM type: YTN; PAM sequence: CTG
ctccaaaatagcataattaa

SEQ ID NO: 405358 - DNA, 20 bp, Artificial Sequence
  Description of Artificial Sequence: Synthetic oligonucleotide
  Target: LAMA2; (+) strand; PAM type: YTN; PAM sequence: CTC
caaaatagcataattaatct

SEQ ID NO: 405359 - DNA, 20 bp, Artificial Sequence
  Description of Artificial Sequence: Synthetic oligonucleotide
  Target: LAMA2; (+) strand; PAM type: YTN; PAM sequence: TTA
atctatactaactttaccag

SEQ ID NO: 405360 - DNA, 20 bp, Artificial Sequence
  Description of Artificial Sequence: Synthetic oligonucleotide
  Target: LAMA2; (+) strand; PAM type: YTN; PAM sequence: CTA
tactaactttaccagacatc

SEQ ID NO: 405361 - DNA, 20 bp, Artificial Sequence
  Description of Artificial Sequence: Synthetic oligonucleotide
  Target: LAMA2; (+) strand; PAM type: YTN; PAM sequence: CTA
actttaccagacatcaaggt

SEQ ID NO: 405362 - DNA, 20 bp, Artificial Sequence
  Description of Artificial Sequence: Synthetic oligonucleotide
  Target: LAMA2; (+) strand; PAM type: YTN; PAM sequence: CTT
taccagacatcaaggttcaa

SEQ ID NO: 405363 - DNA, 20 bp, Artificial Sequence
  Description of Artificial Sequence: Synthetic oligonucleotide
  Target: LAMA2; (+) strand; PAM type: YTN; PAM sequence: TTT
accagacatcaaggttcaaa

SEQ ID NO: 405364 - DNA, 20 bp, Artificial Sequence
  Description of Artificial Sequence: Synthetic oligonucleotide
  Target: LAMA2; (+) strand; PAM type: YTN; PAM sequence: TTA
ccagacatcaaggttcaaaa

SEQ ID NO: 405365 - DNA, 20 bp, Artificial Sequence
  Description of Artificial Sequence: Synthetic oligonucleotide
  Target: LAMA2; (+) strand; PAM type: YTN; PAM sequence: TTC
aaaagagaaacaaaaggcaa

SEQ ID NO: 405366 - DNA, 20 bp, Artificial Sequence
  Description of Artificial Sequence: Synthetic oligonucleotide
  Target: LAMA2; (+) strand; PAM type: YTN; PAM sequence: TTA
agaagcctagcatttattaa

SEQ ID NO: 405367 - DNA, 20 bp, Artificial Sequence
  Description of Artificial Sequence: Synthetic oligonucleotide
  Target: LAMA2; (+) strand; PAM type: YTN; PAM sequence: CTA
gcatttattaattatgaaag

SEQ ID NO: 405368 - DNA, 20 bp, Artificial Sequence
  Description of Artificial Sequence: Synthetic oligonucleotide
  Target: LAMA2; (+) strand; PAM type: YTN; PAM sequence: TTT
attaattatgaaagaatagg

SEQ ID NO: 405369 - DNA, 20 bp, Artificial Sequence
  Description of Artificial Sequence: Synthetic oligonucleotide
  Target: LAMA2; (+) strand; PAM type: YTN; PAM sequence: TTA
ttaattatgaaagaataggg

SEQ ID NO: 405370 - DNA, 20 bp, Artificial Sequence
  Description of Artificial Sequence: Synthetic oligonucleotide
  Target: LAMA2; (+) strand; PAM type: YTN; PAM sequence: TTA
attatgaaagaataggggct

SEQ ID NO: 405371 - DNA, 20 bp, Artificial Sequence
  Description of Artificial Sequence: Synthetic oligonucleotide
  Target: LAMA2; (+) strand; PAM type: YTN; PAM sequence: TTA
tgaaagaataggggcttttt

SEQ ID NO: 405372 - DNA, 20 bp, Artificial Sequence
  Description of Artificial Sequence: Synthetic oligonucleotide
  Target: LAMA2; (+) strand; PAM type: YTN; PAM sequence: CTT
ttttagtaaatgcattcaga

SEQ ID NO: 405373 - DNA, 20 bp, Artificial Sequence
  Description of Artificial Sequence: Synthetic oligonucleotide
  Target: LAMA2; (+) strand; PAM type: YTN; PAM sequence: TTT
tttagtaaatgcattcagaa

SEQ ID NO: 405374 - DNA, 20 bp, Artificial Sequence
  Description of Artificial Sequence: Synthetic oligonucleotide
  Target: LAMA2; (+) strand; PAM type: YTN; PAM sequence: TTT
ttagtaaatgcattcagaat

SEQ ID NO: 405375 - DNA, 20 bp, Artificial Sequence
  Description of Artificial Sequence: Synthetic oligonucleotide
  Target: LAMA2; (+) strand; PAM type: YTN; PAM sequence: TTT
tagtaaatgcattcagaatg

SEQ ID NO: 405376 - DNA, 20 bp, Artificial Sequence
  Description of Artificial Sequence: Synthetic oligonucleotide
  Target: LAMA2; (+) strand; PAM type: YTN; PAM sequence: TTT
agtaaatgcattcagaatga

SEQ ID NO: 405377 - DNA, 20 bp, Artificial Sequence
  Description of Artificial Sequence: Synthetic oligonucleotide
  Target: LAMA2; (+) strand; PAM type: YTN; PAM sequence: TTA
gtaaatgcattcagaatgaa

SEQ ID NO: 405378 - DNA, 20 bp, Artificial Sequence
  Description of Artificial Sequence: Synthetic oligonucleotide
  Target: LAMA2; (+) strand; PAM type: YTN; PAM sequence: TTC
agaatgaataggataactct

SEQ ID NO: 405379 - DNA, 20 bp, Artificial Sequence
  Description of Artificial Sequence: Synthetic oligonucleotide
  Target: LAMA2; (+) strand; PAM type: YTN; PAM sequence: CTC
tattctattctatgtcgaaa

SEQ ID NO: 405380 - DNA, 20 bp, Artificial Sequence
  Description of Artificial Sequence: Synthetic oligonucleotide
  Target: LAMA2; (+) strand; PAM type: YTN; PAM sequence: CTA
ttctattctatgtcgaaata

SEQ ID NO: 405381 - DNA, 20 bp, Artificial Sequence
  Description of Artificial Sequence: Synthetic oligonucleotide
  Target: LAMA2; (+) strand; PAM type: YTN; PAM sequence: TTC
tattctatgtcgaaatatta

SEQ ID NO: 405382 - DNA, 20 bp, Artificial Sequence
  Description of Artificial Sequence: Synthetic oligonucleotide
  Target: LAMA2; (+) strand; PAM type: YTN; PAM sequence: CTA
ttctatgtcgaaatattata

SEQ ID NO: 405383 - DNA, 20 bp, Artificial Sequence
  Description of Artificial Sequence: Synthetic oligonucleotide
  Target: LAMA2; (+) strand; PAM type: YTN; PAM sequence: TTC
tatgtcgaaatattatagag

SEQ ID NO: 405384 - DNA, 20 bp, Artificial Sequence
  Description of Artificial Sequence: Synthetic oligonucleotide
  Target: LAMA2; (+) strand; PAM type: YTN; PAM sequence: CTA
tgtcgaaatattatagagtg

SEQ ID NO: 405385 - DNA, 20 bp, Artificial Sequence
  Description of Artificial Sequence: Synthetic oligonucleotide
  Target: LAMA2; (+) strand; PAM type: YTN; PAM sequence: TTA
tagagtgtacctggaaggac

SEQ ID NO: 405386 - DNA, 20 bp, Artificial Sequence
  Description of Artificial Sequence: Synthetic oligonucleotide
  Target: LAMA2; (+) strand; PAM type: YTN; PAM sequence: CTG
gaaggactcatattatttct

SEQ ID NO: 405387 - DNA, 20 bp, Artificial Sequence
  Description of Artificial Sequence: Synthetic oligonucleotide
  Target: LAMA2; (+) strand; PAM type: YTN; PAM sequence: CTC
atattatttctcatcccata

SEQ ID NO: 405388 - DNA, 20 bp, Artificial Sequence
  Description of Artificial Sequence: Synthetic oligonucleotide
  Target: LAMA2; (+) strand; PAM type: YTN; PAM sequence: TTA
tttctcatcccatagtcacc

SEQ ID NO: 405389 - DNA, 20 bp, Artificial Sequence
  Description of Artificial Sequence: Synthetic oligonucleotide
  Target: LAMA2; (+) strand; PAM type: YTN; PAM sequence: TTT
ctcatcccatagtcaccaat

SEQ ID NO: 405390 - DNA, 20 bp, Artificial Sequence
  Description of Artificial Sequence: Synthetic oligonucleotide
  Target: LAMA2; (+) strand; PAM type: YTN; PAM sequence: TTC
tcatcccatagtcaccaatt

SEQ ID NO: 405391 - DNA, 20 bp, Artificial Sequence
  Description of Artificial Sequence: Synthetic oligonucleotide
  Target: LAMA2; (+) strand; PAM type: YTN; PAM sequence: CTC
atcccatagtcaccaattca

SEQ ID NO: 405392 - DNA, 20 bp, Artificial Sequence
  Description of Artificial Sequence: Synthetic oligonucleotide
  Target: LAMA2; (+) strand; PAM type: YTN; PAM sequence: TTC
aaagccagacttaccttgtt

SEQ ID NO: 405393 - DNA, 20 bp, Artificial Sequence
  Description of Artificial Sequence: Synthetic oligonucleotide
  Target: LAMA2; (+) strand; PAM type: YTN; PAM sequence: CTT
accttgtttctcctagtgtt

SEQ ID NO: 405394 - DNA, 20 bp, Artificial Sequence
  Description of Artificial Sequence: Synthetic oligonucleotide
  Target: LAMA2; (+) strand; PAM type: YTN; PAM sequence: TTA
ccttgtttctcctagtgttt

SEQ ID NO: 405395 - DNA, 20 bp, Artificial Sequence
  Description of Artificial Sequence: Synthetic oligonucleotide
  Target: LAMA2; (+) strand; PAM type: YTN; PAM sequence: CTT
gtttctcctagtgttttcta

SEQ ID NO: 405396 - DNA, 20 bp, Artificial Sequence
  Description of Artificial Sequence: Synthetic oligonucleotide
  Target: LAMA2; (+) strand; PAM type: YTN; PAM sequence: TTG
tttctcctagtgttttctaa

SEQ ID NO: 405397 - DNA, 20 bp, Artificial Sequence
  Description of Artificial Sequence: Synthetic oligonucleotide
  Target: LAMA2; (+) strand; PAM type: YTN; PAM sequence: TTT
ctcctagtgttttctaatga

SEQ ID NO: 405398 - DNA, 20 bp, Artificial Sequence
  Description of Artificial Sequence: Synthetic oligonucleotide
  Target: LAMA2; (+) strand; PAM type: YTN; PAM sequence: TTC
tcctagtgttttctaatgaa

SEQ ID NO: 405399 - DNA, 20 bp, Artificial Sequence
  Description of Artificial Sequence: Synthetic oligonucleotide
  Target: LAMA2; (+) strand; PAM type: YTN; PAM sequence: CTC
ctagtgttttctaatgaatt

SEQ ID NO: 405400 - DNA, 20 bp, Artificial Sequence
  Description of Artificial Sequence: Synthetic oligonucleotide
  Target: LAMA2; (+) strand; PAM type: YTN; PAM sequence: CTA
gtgttttctaatgaattaaa

SEQ ID NO: 405401 - DNA, 20 bp, Artificial Sequence
  Description of Artificial Sequence: Synthetic oligonucleotide
  Target: LAMA2; (+) strand; PAM type: YTN; PAM sequence: TTT
tctaatgaattaaatgaact

SEQ ID NO: 405402 - DNA, 20 bp, Artificial Sequence
  Description of Artificial Sequence: Synthetic oligonucleotide
  Target: LAMA2; (+) strand; PAM type: YTN; PAM sequence: TTT
ctaatgaattaaatgaactg

SEQ ID NO: 405403 - DNA, 20 bp, Artificial Sequence
  Description of Artificial Sequence: Synthetic oligonucleotide
  Target: LAMA2; (+) strand; PAM type: YTN; PAM sequence: TTC
taatgaattaaatgaactgg

SEQ ID NO: 405404 - DNA, 20 bp, Artificial Sequence
  Description of Artificial Sequence: Synthetic oligonucleotide
  Target: LAMA2; (+) strand; PAM type: YTN; PAM sequence: CTA
atgaattaaatgaactgggg

SEQ ID NO: 405405 - DNA, 20 bp, Artificial Sequence
  Description of Artificial Sequence: Synthetic oligonucleotide
  Target: LAMA2; (+) strand; PAM type: YTN; PAM sequence: TTA
aatgaactggggggatctac

SEQ ID NO: 405406 - DNA, 20 bp, Artificial Sequence
  Description of Artificial Sequence: Synthetic oligonucleotide
  Target: LAMA2; (+) strand; PAM type: YTN; PAM sequence: CTG
gggggatctacagctctgtg

SEQ ID NO: 405407 - DNA, 20 bp, Artificial Sequence
  Description of Artificial Sequence: Synthetic oligonucleotide
  Target: LAMA2; (+) strand; PAM type: YTN; PAM sequence: CTA
cagctctgtgtttagccact

SEQ ID NO: 405408 - DNA, 20 bp, Artificial Sequence
  Description of Artificial Sequence: Synthetic oligonucleotide
  Target: LAMA2; (+) strand; PAM type: YTN; PAM sequence: CTC
tgtgtttagccactcccagt

SEQ ID NO: 405409 - DNA, 20 bp, Artificial Sequence
  Description of Artificial Sequence: Synthetic oligonucleotide
  Target: LAMA2; (+) strand; PAM type: YTN; PAM sequence: CTG
tgtttagccactcccagtcc

SEQ ID NO: 405410 - DNA, 20 bp, Artificial Sequence
  Description of Artificial Sequence: Synthetic oligonucleotide
  Target: LAMA2; (+) strand; PAM type: YTN; PAM sequence: TTT
agccactcccagtccacaac

SEQ ID NO: 405411 - DNA, 20 bp, Artificial Sequence
  Description of Artificial Sequence: Synthetic oligonucleotide
  Target: LAMA2; (+) strand; PAM type: YTN; PAM sequence: TTA
gccactcccagtccacaact

SEQ ID NO: 405412 - DNA, 20 bp, Artificial Sequence
  Description of Artificial Sequence: Synthetic oligonucleotide
  Target: LAMA2; (+) strand; PAM type: YTN; PAM sequence: CTC
ccagtccacaactctttccc

SEQ ID NO: 405413 - DNA, 20 bp, Artificial Sequence
  Description of Artificial Sequence: Synthetic oligonucleotide
  Target: LAMA2; (+) strand; PAM type: YTN; PAM sequence: CTC
tttcccgcaggtatctccac

SEQ ID NO: 405414 - DNA, 20 bp, Artificial Sequence
  Description of Artificial Sequence: Synthetic oligonucleotide
  Target: LAMA2; (+) strand; PAM type: YTN; PAM sequence: CTT
tcccgcaggtatctccacaa

SEQ ID NO: 405415 - DNA, 20 bp, Artificial Sequence
  Description of Artificial Sequence: Synthetic oligonucleotide
  Target: LAMA2; (+) strand; PAM type: YTN; PAM sequence: TTT
cccgcaggtatctccacaat

SEQ ID NO: 405416 - DNA, 20 bp, Artificial Sequence
  Description of Artificial Sequence: Synthetic oligonucleotide
  Target: LAMA2; (+) strand; PAM type: YTN; PAM sequence: TTC
ccgcaggtatctccacaatc

SEQ ID NO: 405417 - DNA, 20 bp, Artificial Sequence
  Description of Artificial Sequence: Synthetic oligonucleotide
  Target: LAMA2; (+) strand; PAM type: YTN; PAM sequence: CTC
cacaatcgcagtaacatcag

SEQ ID NO: 405418 - DNA, 20 bp, Artificial Sequence
  Description of Artificial Sequence: Synthetic oligonucleotide
  Target: LAMA2; (+) strand; PAM type: YTN; PAM sequence: CTC
atgtttggaaaaaatatttt

SEQ ID NO: 405419 - DNA, 20 bp, Artificial Sequence
  Description of Artificial Sequence: Synthetic oligonucleotide
  Target: LAMA2; (+) strand; PAM type: YTN; PAM sequence: TTT
ggaaaaaatattttaaatgt

SEQ ID NO: 405420 - DNA, 20 bp, Artificial Sequence
  Description of Artificial Sequence: Synthetic oligonucleotide
  Target: LAMA2; (+) strand; PAM type: YTN; PAM sequence: TTG
gaaaaaatattttaaatgta

SEQ ID NO: 405421 - DNA, 20 bp, Artificial Sequence
  Description of Artificial Sequence: Synthetic oligonucleotide
  Target: LAMA2; (+) strand; PAM type: YTN; PAM sequence: TTT
taaatgtattcacaagactt

SEQ ID NO: 405422 - DNA, 20 bp, Artificial Sequence
  Description of Artificial Sequence: Synthetic oligonucleotide
  Target: LAMA2; (+) strand; PAM type: YTN; PAM sequence: TTT
aaatgtattcacaagactta

SEQ ID NO: 405423 - DNA, 20 bp, Artificial Sequence
  Description of Artificial Sequence: Synthetic oligonucleotide
  Target: LAMA2; (+) strand; PAM type: YTN; PAM sequence: TTA
aatgtattcacaagacttat

SEQ ID NO: 405424 - DNA, 20 bp, Artificial Sequence
  Description of Artificial Sequence: Synthetic oligonucleotide
  Target: LAMA2; (+) strand; PAM type: YTN; PAM sequence: TTC
acaagacttatcttagatat

SEQ ID NO: 405425 - DNA, 20 bp, Artificial Sequence
  Description of Artificial Sequence: Synthetic oligonucleotide
  Target: LAMA2; (+) strand; PAM type: YTN; PAM sequence: CTT
atcttagatattcattaatt

SEQ ID NO: 405426 - DNA, 20 bp, Artificial Sequence
  Description of Artificial Sequence: Synthetic oligonucleotide
  Target: LAMA2; (+) strand; PAM type: YTN; PAM sequence: TTA
tcttagatattcattaatta

SEQ ID NO: 405427 - DNA, 20 bp, Artificial Sequence
  Description of Artificial Sequence: Synthetic oligonucleotide
  Target: LAMA2; (+) strand; PAM type: YTN; PAM sequence: CTT
agatattcattaattatgca

SEQ ID NO: 405428 - DNA, 20 bp, Artificial Sequence
  Description of Artificial Sequence: Synthetic oligonucleotide
  Target: LAMA2; (+) strand; PAM type: YTN; PAM sequence: TTA
gatattcattaattatgcat

SEQ ID NO: 405429 - DNA, 20 bp, Artificial Sequence
  Description of Artificial Sequence: Synthetic oligonucleotide
  Target: LAMA2; (+) strand; PAM type: YTN; PAM sequence: TTC
attaattatgcatccaatat

SEQ ID NO: 405430 - DNA, 20 bp, Artificial Sequence
  Description of Artificial Sequence: Synthetic oligonucleotide
  Target: LAMA2; (+) strand; PAM type: YTN; PAM sequence: TTA
attatgcatccaatattgat

SEQ ID NO: 405431 - DNA, 20 bp, Artificial Sequence
  Description of Artificial Sequence: Synthetic oligonucleotide
  Target: LAMA2; (+) strand; PAM type: YTN; PAM sequence: TTA
tgcatccaatattgattaaa

SEQ ID NO: 405432 - DNA, 20 bp, Artificial Sequence
  Description of Artificial Sequence: Synthetic oligonucleotide
  Target: LAMA2; (+) strand; PAM type: YTN; PAM sequence: TTG
attaaacatatattctctgt

SEQ ID NO: 405433 - DNA, 20 bp, Artificial Sequence
  Description of Artificial Sequence: Synthetic oligonucleotide
  Target: LAMA2; (+) strand; PAM type: YTN; PAM sequence: TTA
aacatatattctctgtgagg

SEQ ID NO: 405434 - DNA, 20 bp, Artificial Sequence
  Description of Artificial Sequence: Synthetic oligonucleotide
  Target: LAMA2; (+) strand; PAM type: YTN; PAM sequence: TTC
tctgtgaggcaatttgctat

SEQ ID NO: 405435 - DNA, 20 bp, Artificial Sequence
  Description of Artificial Sequence: Synthetic oligonucleotide
  Target: LAMA2; (+) strand; PAM type: YTN; PAM sequence: CTC
tgtgaggcaatttgctatac

SEQ ID NO: 405436 - DNA, 20 bp, Artificial Sequence
  Description of Artificial Sequence: Synthetic oligonucleotide
  Target: LAMA2; (+) strand; PAM type: YTN; PAM sequence: CTG
tgaggcaatttgctatacta

SEQ ID NO: 405437 - DNA, 20 bp, Artificial Sequence
  Description of Artificial Sequence: Synthetic oligonucleotide
  Target: LAMA2; (+) strand; PAM type: YTN; PAM sequence: TTT
gctatactaaaatctttgtc

SEQ ID NO: 405438 - DNA, 20 bp, Artificial Sequence
  Description of Artificial Sequence: Synthetic oligonucleotide
  Target: LAMA2; (+) strand; PAM type: YTN; PAM sequence: TTG
ctatactaaaatctttgtca

SEQ ID NO: 405439 - DNA, 20 bp, Artificial Sequence
  Description of Artificial Sequence: Synthetic oligonucleotide
  Target: LAMA2; (+) strand; PAM type: YTN; PAM sequence: CTA
tactaaaatctttgtcatcc

SEQ ID NO: 405440 - DNA, 20 bp, Artificial Sequence
  Description of Artificial Sequence: Synthetic oligonucleotide
  Target: LAMA2; (+) strand; PAM type: YTN; PAM sequence: CTA
aaatctttgtcatcctacaa

SEQ ID NO: 405441 - DNA, 20 bp, Artificial Sequence
  Description of Artificial Sequence: Synthetic oligonucleotide
  Target: LAMA2; (+) strand; PAM type: YTN; PAM sequence: CTT
tgtcatcctacaaacatcaa

SEQ ID NO: 405442 - DNA, 20 bp, Artificial Sequence
  Description of Artificial Sequence: Synthetic oligonucleotide
  Target: LAMA2; (+) strand; PAM type: YTN; PAM sequence: TTT
gtcatcctacaaacatcaac

SEQ ID NO: 405443 - DNA, 20 bp, Artificial Sequence
  Description of Artificial Sequence: Synthetic oligonucleotide
  Target: LAMA2; (+) strand; PAM type: YTN; PAM sequence: TTG
tcatcctacaaacatcaact

SEQ ID NO: 405444 - DNA, 20 bp, Artificial Sequence
  Description of Artificial Sequence: Synthetic oligonucleotide
  Target: LAMA2; (+) strand; PAM type: YTN; PAM sequence: CTA
caaacatcaactggattcta

SEQ ID NO: 405445 - DNA, 20 bp, Artificial Sequence
  Description of Artificial Sequence: Synthetic oligonucleotide
  Target: LAMA2; (+) strand; PAM type: YTN; PAM sequence: CTG
gattctaggatccaagtact

SEQ ID NO: 405446 - DNA, 20 bp, Artificial Sequence
  Description of Artificial Sequence: Synthetic oligonucleotide
  Target: LAMA2; (+) strand; PAM type: YTN; PAM sequence: TTC
taggatccaagtactgtatt

SEQ ID NO: 405447 - DNA, 20 bp, Artificial Sequence
  Description of Artificial Sequence: Synthetic oligonucleotide
  Target: LAMA2; (+) strand; PAM type: YTN; PAM sequence: CTA
ggatccaagtactgtattgt

SEQ ID NO: 405448 - DNA, 20 bp, Artificial Sequence
  Description of Artificial Sequence: Synthetic oligonucleotide
  Target: LAMA2; (+) strand; PAM type: YTN; PAM sequence: CTG
tattgtatgtactagatgtt

SEQ ID NO: 405449 - DNA, 20 bp, Artificial Sequence
  Description of Artificial Sequence: Synthetic oligonucleotide
  Target: LAMA2; (+) strand; PAM type: YTN; PAM sequence: TTG
tatgtactagatgttttgag

SEQ ID NO: 405450 - DNA, 20 bp, Artificial Sequence
  Description of Artificial Sequence: Synthetic oligonucleotide
  Target: LAMA2; (+) strand; PAM type: YTN; PAM sequence: CTA
gatgttttgagtttgtgcct

SEQ ID NO: 405451 - DNA, 20 bp, Artificial Sequence
  Description of Artificial Sequence: Synthetic oligonucleotide
  Target: LAMA2; (+) strand; PAM type: YTN; PAM sequence: TTT
tgagtttgtgcctgacatag

SEQ ID NO: 405452 - DNA, 20 bp, Artificial Sequence
  Description of Artificial Sequence: Synthetic oligonucleotide
  Target: LAMA2; (+) strand; PAM type: YTN; PAM sequence: TTT
gagtttgtgcctgacatagg

SEQ ID NO: 405453 - DNA, 20 bp, Artificial Sequence
  Description of Artificial Sequence: Synthetic oligonucleotide
  Target: LAMA2; (+) strand; PAM type: YTN; PAM sequence: TTG
agtttgtgcctgacatagga

SEQ ID NO: 405454 - DNA, 20 bp, Artificial Sequence
  Description of Artificial Sequence: Synthetic oligonucleotide
  Target: LAMA2; (+) strand; PAM type: YTN; PAM sequence: TTT
gtgcctgacataggacctag

SEQ ID NO: 405455 - DNA, 20 bp, Artificial Sequence
  Description of Artificial Sequence: Synthetic oligonucleotide
  Target: LAMA2; (+) strand; PAM type: YTN; PAM sequence: TTG
tgcctgacataggacctagc

SEQ ID NO: 405456 - DNA, 20 bp, Artificial Sequence
  Description of Artificial Sequence: Synthetic oligonucleotide
  Target: LAMA2; (+) strand; PAM type: YTN; PAM sequence: CTG
acataggacctagcccataa

SEQ ID NO: 405457 - DNA, 20 bp, Artificial Sequence
  Description of Artificial Sequence: Synthetic oligonucleotide
  Target: LAMA2; (+) strand; PAM type: YTN; PAM sequence: CTA
gcccataatctcttagatgg

SEQ ID NO: 405458 - DNA, 20 bp, Artificial Sequence
  Description of Artificial Sequence: Synthetic oligonucleotide
  Target: LAMA2; (+) strand; PAM type: YTN; PAM sequence: CTC
ttagatggtctcatgaaatt

SEQ ID NO: 405459 - DNA, 20 bp, Artificial Sequence
  Description of Artificial Sequence: Synthetic oligonucleotide
  Target: LAMA2; (+) strand; PAM type: YTN; PAM sequence: CTT
agatggtctcatgaaattta

SEQ ID NO: 405460 - DNA, 20 bp, Artificial Sequence
  Description of Artificial Sequence: Synthetic oligonucleotide
  Target: LAMA2; (+) strand; PAM type: YTN; PAM sequence: TTA
gatggtctcatgaaatttac

SEQ ID NO: 405461 - DNA, 20 bp, Artificial Sequence
  Description of Artificial Sequence: Synthetic oligonucleotide
  Target: LAMA2; (+) strand; PAM type: YTN; PAM sequence: CTC
atgaaatttacattctagtg

SEQ ID NO: 405462 - DNA, 20 bp, Artificial Sequence
  Description of Artificial Sequence: Synthetic oligonucleotide
  Target: LAMA2; (+) strand; PAM type: YTN; PAM sequence: TTT
acattctagtgaaggagaca

SEQ ID NO: 405463 - DNA, 20 bp, Artificial Sequence
  Description of Artificial Sequence: Synthetic oligonucleotide
  Target: LAMA2; (+) strand; PAM type: YTN; PAM sequence: TTA
cattctagtgaaggagacag

SEQ ID NO: 405464 - DNA, 20 bp, Artificial Sequence
  Description of Artificial Sequence: Synthetic oligonucleotide
  Target: LAMA2; (+) strand; PAM type: YTN; PAM sequence: TTC
tagtgaaggagacagaagaa

SEQ ID NO: 405465 - DNA, 20 bp, Artificial Sequence
  Description of Artificial Sequence: Synthetic oligonucleotide
  Target: LAMA2; (+) strand; PAM type: YTN; PAM sequence: CTA
gtgaaggagacagaagaaac

SEQ ID NO: 405466 - DNA, 20 bp, Artificial Sequence
  Description of Artificial Sequence: Synthetic oligonucleotide
  Target: LAMA2; (+) strand; PAM type: YTN; PAM sequence: CTC
cttaatcgtctgaatctaat

SEQ ID NO: 405467 - DNA, 20 bp, Artificial Sequence
  Description of Artificial Sequence: Synthetic oligonucleotide
  Target: LAMA2; (+) strand; PAM type: YTN; PAM sequence: CTT
aatcgtctgaatctaatttg

SEQ ID NO: 405468 - DNA, 20 bp, Artificial Sequence
  Description of Artificial Sequence: Synthetic oligonucleotide
  Target: LAMA2; (+) strand; PAM type: YTN; PAM sequence: TTA
atcgtctgaatctaatttgt

SEQ ID NO: 405469 - DNA, 20 bp, Artificial Sequence
  Description of Artificial Sequence: Synthetic oligonucleotide
  Target: LAMA2; (+) strand; PAM type: YTN; PAM sequence: CTG
aatctaatttgttccagaaa

SEQ ID NO: 405470 - DNA, 20 bp, Artificial Sequence
  Description of Artificial Sequence: Synthetic oligonucleotide
  Target: LAMA2; (+) strand; PAM type: YTN; PAM sequence: CTA
atttgttccagaaaaatttg

SEQ ID NO: 405471 - DNA, 20 bp, Artificial Sequence
  Description of Artificial Sequence: Synthetic oligonucleotide
  Target: LAMA2; (+) strand; PAM type: YTN; PAM sequence: TTT
gttccagaaaaatttgttgg

SEQ ID NO: 405472 - DNA, 20 bp, Artificial Sequence
  Description of Artificial Sequence: Synthetic oligonucleotide
  Target: LAMA2; (+) strand; PAM type: YTN; PAM sequence: TTG
ttccagaaaaatttgttgga

SEQ ID NO: 405473 - DNA, 20 bp, Artificial Sequence
  Description of Artificial Sequence: Synthetic oligonucleotide
  Target: LAMA2; (+) strand; PAM type: YTN; PAM sequence: TTC
cagaaaaatttgttggaagg

SEQ ID NO: 405474 - DNA, 20 bp, Artificial Sequence
  Description of Artificial Sequence: Synthetic oligonucleotide
  Target: LAMA2; (+) strand; PAM type: YTN; PAM sequence: TTT
gttggaaggcaaatattcag

SEQ ID NO: 405475 - DNA, 20 bp, Artificial Sequence
  Description of Artificial Sequence: Synthetic oligonucleotide
  Target: LAMA2; (+) strand; PAM type: YTN; PAM sequence: TTG
ttggaaggcaaatattcaga

SEQ ID NO: 405476 - DNA, 20 bp, Artificial Sequence
  Description of Artificial Sequence: Synthetic oligonucleotide
  Target: LAMA2; (+) strand; PAM type: YTN; PAM sequence: TTG
gaaggcaaatattcagagta

SEQ ID NO: 405477 - DNA, 20 bp, Artificial Sequence
  Description of Artificial Sequence: Synthetic oligonucleotide
  Target: LAMA2; (+) strand; PAM type: YTN; PAM sequence: TTC
agagtaggatcctatatata

SEQ ID NO: 405478 - DNA, 20 bp, Artificial Sequence
  Description of Artificial Sequence: Synthetic oligonucleotide
  Target: LAMA2; (+) strand; PAM type: YTN; PAM sequence: CTA
tatataagaaatgtaataat

SEQ ID NO: 405479 - DNA, 20 bp, Artificial Sequence
  Description of Artificial Sequence: Synthetic oligonucleotide
  Target: LAMA2; (+) strand; PAM type: YTN; PAM sequence: TTC
tcagcccatccagaaacccc

SEQ ID NO: 405480 - DNA, 20 bp, Artificial Sequence
  Description of Artificial Sequence: Synthetic oligonucleotide
  Target: LAMA2; (+) strand; PAM type: YTN; PAM sequence: CTC
agcccatccagaaaccccgc

SEQ ID NO: 405481 - DNA, 20 bp, Artificial Sequence
  Description of Artificial Sequence: Synthetic oligonucleotide
  Target: LAMA2; (+) strand; PAM type: YTN; PAM sequence: CTT
tgcccaaataccactaagac

SEQ ID NO: 405482 - DNA, 20 bp, Artificial Sequence
  Description of Artificial Sequence: Synthetic oligonucleotide
  Target: LAMA2; (+) strand; PAM type: YTN; PAM sequence: TTT
gcccaaataccactaagaca

SEQ ID NO: 405483 - DNA, 20 bp, Artificial Sequence
  Description of Artificial Sequence: Synthetic oligonucleotide
  Target: LAMA2; (+) strand; PAM type: YTN; PAM sequence: TTG
cccaaataccactaagacac

SEQ ID NO: 405484 - DNA, 20 bp, Artificial Sequence
  Description of Artificial Sequence: Synthetic oligonucleotide
  Target: LAMA2; (+) strand; PAM type: YTN; PAM sequence: CTA
agacacccttaagcatcaat

SEQ ID NO: 405485 - DNA, 20 bp, Artificial Sequence
  Description of Artificial Sequence: Synthetic oligonucleotide
  Target: LAMA2; (+) strand; PAM type: YTN; PAM sequence: CTT
aagcatcaatataactatct

SEQ ID NO: 405486 - DNA, 20 bp, Artificial Sequence
  Description of Artificial Sequence: Synthetic oligonucleotide
  Target: LAMA2; (+) strand; PAM type: YTN; PAM sequence: TTA
agcatcaatataactatcta

SEQ ID NO: 405487 - DNA, 20 bp, Artificial Sequence
  Description of Artificial Sequence: Synthetic oligonucleotide
  Target: LAMA2; (+) strand; PAM type: YTN; PAM sequence: CTA
tctactaccaagtgctttta

SEQ ID NO: 405488 - DNA, 20 bp, Artificial Sequence
  Description of Artificial Sequence: Synthetic oligonucleotide
  Target: LAMA2; (+) strand; PAM type: YTN; PAM sequence: CTA
ctaccaagtgcttttacaaa

SEQ ID NO: 405489 - DNA, 20 bp, Artificial Sequence
  Description of Artificial Sequence: Synthetic oligonucleotide
  Target: LAMA2; (+) strand; PAM type: YTN; PAM sequence: CTA
ccaagtgcttttacaaaaca

SEQ ID NO: 405490 - DNA, 20 bp, Artificial Sequence
  Description of Artificial Sequence: Synthetic oligonucleotide
  Target: LAMA2; (+) strand; PAM type: YTN; PAM sequence: CTT
ttacaaaacataaagcactt

SEQ ID NO: 405491 - DNA, 20 bp, Artificial Sequence
  Description of Artificial Sequence: Synthetic oligonucleotide
  Target: LAMA2; (+) strand; PAM type: YTN; PAM sequence: TTT
tacaaaacataaagcactta

SEQ ID NO: 405492 - DNA, 20 bp, Artificial Sequence
  Description of Artificial Sequence: Synthetic oligonucleotide
  Target: LAMA2; (+) strand; PAM type: YTN; PAM sequence: TTT
acaaaacataaagcacttaa

SEQ ID NO: 405493 - DNA, 20 bp, Artificial Sequence
  Description of Artificial Sequence: Synthetic oligonucleotide
  Target: LAMA2; (+) strand; PAM type: YTN; PAM sequence: TTA
caaaacataaagcacttaaa

SEQ ID NO: 405494 - DNA, 20 bp, Artificial Sequence
  Description of Artificial Sequence: Synthetic oligonucleotide
  Target: LAMA2; (+) strand; PAM type: YTN; PAM sequence: CTT
aaaaaaactaatgacttagt

SEQ ID NO: 405495 - DNA, 20 bp, Artificial Sequence
  Description of Artificial Sequence: Synthetic oligonucleotide
  Target: LAMA2; (+) strand; PAM type: YTN; PAM sequence: TTA
aaaaaactaatgacttagtt

SEQ ID NO: 405496 - DNA, 20 bp, Artificial Sequence
  Description of Artificial Sequence: Synthetic oligonucleotide
  Target: LAMA2; (+) strand; PAM type: YTN; PAM sequence: CTA
atgacttagttattgcacac

SEQ ID NO: 405497 - DNA, 20 bp, Artificial Sequence
  Description of Artificial Sequence: Synthetic oligonucleotide
  Target: LAMA2; (+) strand; PAM type: YTN; PAM sequence: CTT
agttattgcacacctcatga

SEQ ID NO: 405498 - DNA, 20 bp, Artificial Sequence
  Description of Artificial Sequence: Synthetic oligonucleotide
  Target: LAMA2; (+) strand; PAM type: YTN; PAM sequence: TTA
gttattgcacacctcatgaa

SEQ ID NO: 405499 - DNA, 20 bp, Artificial Sequence
  Description of Artificial Sequence: Synthetic oligonucleotide
  Target: LAMA2; (+) strand; PAM type: YTN; PAM sequence: TTA
ttgcacacctcatgaaaggt

SEQ ID NO: 405500 - DNA, 20 bp, Artificial Sequence
  Description of Artificial Sequence: Synthetic oligonucleotide
  Target: LAMA2; (+) strand; PAM type: YTN; PAM sequence: TTG
cacacctcatgaaaggtgag

SEQ ID NO: 405501 - DNA, 20 bp, Artificial Sequence
  Description of Artificial Sequence: Synthetic oligonucleotide
  Target: LAMA2; (+) strand; PAM type: YTN; PAM sequence: CTC
atgaaaggtgagaggtggtt

SEQ ID NO: 405502 - DNA, 20 bp, Artificial Sequence
  Description of Artificial Sequence: Synthetic oligonucleotide
  Target: LAMA2; (+) strand; PAM type: YTN; PAM sequence: TTT
ttacttattctagcacggtg

SEQ ID NO: 405503 - DNA, 20 bp, Artificial Sequence
  Description of Artificial Sequence: Synthetic oligonucleotide
  Target: LAMA2; (+) strand; PAM type: YTN; PAM sequence: TTT
tacttattctagcacggtgg

SEQ ID NO: 405504 - DNA, 20 bp, Artificial Sequence
  Description of Artificial Sequence: Synthetic oligonucleotide
  Target: LAMA2; (+) strand; PAM type: YTN; PAM sequence: TTT
acttattctagcacggtggc

SEQ ID NO: 405505 - DNA, 20 bp, Artificial Sequence
  Description of Artificial Sequence: Synthetic oligonucleotide
  Target: LAMA2; (+) strand; PAM type: YTN; PAM sequence: TTA
cttattctagcacggtggca

SEQ ID NO: 405506 - DNA, 20 bp, Artificial Sequence
  Description of Artificial Sequence: Synthetic oligonucleotide
  Target: LAMA2; (+) strand; PAM type: YTN; PAM sequence: CTT
attctagcacggtggcagta

SEQ ID NO: 405507 - DNA, 20 bp, Artificial Sequence
  Description of Artificial Sequence: Synthetic oligonucleotide
  Target: LAMA2; (+) strand; PAM type: YTN; PAM sequence: TTA
ttctagcacggtggcagtag

SEQ ID NO: 405508 - DNA, 20 bp, Artificial Sequence
  Description of Artificial Sequence: Synthetic oligonucleotide
  Target: LAMA2; (+) strand; PAM type: YTN; PAM sequence: TTC
tagcacggtggcagtagaga

SEQ ID NO: 405509 - DNA, 20 bp, Artificial Sequence
  Description of Artificial Sequence: Synthetic oligonucleotide
  Target: LAMA2; (+) strand; PAM type: YTN; PAM sequence: CTA
gcacggtggcagtagagatg

SEQ ID NO: 405510 - DNA, 20 bp, Artificial Sequence
  Description of Artificial Sequence: Synthetic oligonucleotide
  Target: LAMA2; (+) strand; PAM type: YTN; PAM sequence: TTT
agggtatttcctgccctaca

SEQ ID NO: 405511 - DNA, 20 bp, Artificial Sequence
  Description of Artificial Sequence: Synthetic oligonucleotide
  Target: LAMA2; (+) strand; PAM type: YTN; PAM sequence: TTA
gggtatttcctgccctacaa

SEQ ID NO: 405512 - DNA, 20 bp, Artificial Sequence
  Description of Artificial Sequence: Synthetic oligonucleotide
  Target: LAMA2; (+) strand; PAM type: YTN; PAM sequence: TTT
cctgccctacaacagcctat

SEQ ID NO: 405513 - DNA, 20 bp, Artificial Sequence
  Description of Artificial Sequence: Synthetic oligonucleotide
  Target: LAMA2; (+) strand; PAM type: YTN; PAM sequence: TTC
ctgccctacaacagcctata

SEQ ID NO: 405514 - DNA, 20 bp, Artificial Sequence
  Description of Artificial Sequence: Synthetic oligonucleotide
  Target: LAMA2; (+) strand; PAM type: YTN; PAM sequence: CTG
ccctacaacagcctatagtc

SEQ ID NO: 405515 - DNA, 20 bp, Artificial Sequence
  Description of Artificial Sequence: Synthetic oligonucleotide
  Target: LAMA2; (+) strand; PAM type: YTN; PAM sequence: CTA
caacagcctatagtctcatt

SEQ ID NO: 405516 - DNA, 20 bp, Artificial Sequence
  Description of Artificial Sequence: Synthetic oligonucleotide
  Target: LAMA2; (+) strand; PAM type: YTN; PAM sequence: CTA
tagtctcattgctattcagt

SEQ ID NO: 405517 - DNA, 20 bp, Artificial Sequence
  Description of Artificial Sequence: Synthetic oligonucleotide
  Target: LAMA2; (+) strand; PAM type: YTN; PAM sequence: CTC
attgctattcagtgatgcat

SEQ ID NO: 405518 - DNA, 20 bp, Artificial Sequence
  Description of Artificial Sequence: Synthetic oligonucleotide
  Target: LAMA2; (+) strand; PAM type: YTN; PAM sequence: TTG
ctattcagtgatgcattgaa

SEQ ID NO: 405519 - DNA, 20 bp, Artificial Sequence
  Description of Artificial Sequence: Synthetic oligonucleotide
  Target: LAMA2; (+) strand; PAM type: YTN; PAM sequence: CTA
ttcagtgatgcattgaataa

SEQ ID NO: 405520 - DNA, 20 bp, Artificial Sequence
  Description of Artificial Sequence: Synthetic oligonucleotide
  Target: LAMA2; (+) strand; PAM type: YTN; PAM sequence: TTC
agtgatgcattgaataatga

SEQ ID NO: 405521 - DNA, 20 bp, Artificial Sequence
  Description of Artificial Sequence: Synthetic oligonucleotide
  Target: LAMA2; (+) strand; PAM type: YTN; PAM sequence: TTG
aataatgacagactgaatag

SEQ ID NO: 405522 - DNA, 20 bp, Artificial Sequence
  Description of Artificial Sequence: Synthetic oligonucleotide
  Target: LAMA2; (+) strand; PAM type: YTN; PAM sequence: CTG
aatagatatgatctgattca

SEQ ID NO: 405523 - DNA, 20 bp, Artificial Sequence
  Description of Artificial Sequence: Synthetic oligonucleotide
  Target: LAMA2; (+) strand; PAM type: YTN; PAM sequence: CTG
attcatgtgaaatgtctctc

SEQ ID NO: 405524 - DNA, 20 bp, Artificial Sequence
  Description of Artificial Sequence: Synthetic oligonucleotide
  Target: LAMA2; (+) strand; PAM type: YTN; PAM sequence: TTC
atgtgaaatgtctctcttct

SEQ ID NO: 405525 - DNA, 20 bp, Artificial Sequence
  Description of Artificial Sequence: Synthetic oligonucleotide
  Target: LAMA2; (+) strand; PAM type: YTN; PAM sequence: CTC
tcttctcagtcctcaggtgg

SEQ ID NO: 405526 - DNA, 20 bp, Artificial Sequence
  Description of Artificial Sequence: Synthetic oligonucleotide
  Target: LAMA2; (+) strand; PAM type: YTN; PAM sequence: CTC
ttctcagtcctcaggtggaa

SEQ ID NO: 405527 - DNA, 20 bp, Artificial Sequence
  Description of Artificial Sequence: Synthetic oligonucleotide
  Target: LAMA2; (+) strand; PAM type: YTN; PAM sequence: CTT
ctcagtcctcaggtggaaga

SEQ ID NO: 405528 - DNA, 20 bp, Artificial Sequence
  Description of Artificial Sequence: Synthetic oligonucleotide
  Target: LAMA2; (+) strand; PAM type: YTN; PAM sequence: TTC
tcagtcctcaggtggaagat

SEQ ID NO: 405529 - DNA, 20 bp, Artificial Sequence
  Description of Artificial Sequence: Synthetic oligonucleotide
  Target: LAMA2; (+) strand; PAM type: YTN; PAM sequence: CTC
agtcctcaggtggaagatag

SEQ ID NO: 405530 - DNA, 20 bp, Artificial Sequence
  Description of Artificial Sequence: Synthetic oligonucleotide
  Target: LAMA2; (+) strand; PAM type: YTN; PAM sequence: CTC
aggtggaagatagtgagggg

SEQ ID NO: 405531 - DNA, 20 bp, Artificial Sequence
  Description of Artificial Sequence: Synthetic oligonucleotide
  Target: LAMA2; (+) strand; PAM type: YTN; PAM sequence: CTA
ttcaatttgatggagaaggt

SEQ ID NO: 405532 - DNA, 20 bp, Artificial Sequence
  Description of Artificial Sequence: Synthetic oligonucleotide
  Target: LAMA2; (+) strand; PAM type: YTN; PAM sequence: TTC
aatttgatggagaaggttat

SEQ ID NO: 405533 - DNA, 20 bp, Artificial Sequence
  Description of Artificial Sequence: Synthetic oligonucleotide
  Target: LAMA2; (+) strand; PAM type: YTN; PAM sequence: TTT
gatggagaaggttatgcatt

SEQ ID NO: 405534 - DNA, 20 bp, Artificial Sequence
  Description of Artificial Sequence: Synthetic oligonucleotide
  Target: LAMA2; (+) strand; PAM type: YTN; PAM sequence: TTG
atggagaaggttatgcattg

SEQ ID NO: 405535 - DNA, 20 bp, Artificial Sequence
  Description of Artificial Sequence: Synthetic oligonucleotide
  Target: LAMA2; (+) strand; PAM type: YTN; PAM sequence: TTA
tgcattggtcagccgtccca

SEQ ID NO: 405536 - DNA, 20 bp, Artificial Sequence
  Description of Artificial Sequence: Synthetic oligonucleotide
  Target: LAMA2; (+) strand; PAM type: YTN; PAM sequence: TTG
gtcagccgtcccattcgctg

SEQ ID NO: 405537 - DNA, 20 bp, Artificial Sequence
  Description of Artificial Sequence: Synthetic oligonucleotide
  Target: LAMA2; (+) strand; PAM type: YTN; PAM sequence: TTC
gctggtaccccaacatctcc

SEQ ID NO: 405538 - DNA, 20 bp, Artificial Sequence
  Description of Artificial Sequence: Synthetic oligonucleotide
  Target: LAMA2; (+) strand; PAM type: YTN; PAM sequence: CTG
gtaccccaacatctccactg

SEQ ID NO: 405539 - DNA, 20 bp, Artificial Sequence
  Description of Artificial Sequence: Synthetic oligonucleotide
  Target: LAMA2; (+) strand; PAM type: YTN; PAM sequence: CTC
cactgtcatgttcaagttca

SEQ ID NO: 405540 - DNA, 20 bp, Artificial Sequence
  Description of Artificial Sequence: Synthetic oligonucleotide
  Target: LAMA2; (+) strand; PAM type: YTN; PAM sequence: CTG
tcatgttcaagttcagaaca

SEQ ID NO: 405541 - DNA, 20 bp, Artificial Sequence
  Description of Artificial Sequence: Synthetic oligonucleotide
  Target: LAMA2; (+) strand; PAM type: YTN; PAM sequence: TTC
aagttcagaacattttcttc

SEQ ID NO: 405542 - DNA, 20 bp, Artificial Sequence
  Description of Artificial Sequence: Synthetic oligonucleotide
  Target: LAMA2; (+) strand; PAM type: YTN; PAM sequence: TTC
agaacattttcttcgagtgc

SEQ ID NO: 405543 - DNA, 20 bp, Artificial Sequence
  Description of Artificial Sequence: Synthetic oligonucleotide
  Target: LAMA2; (+) strand; PAM type: YTN; PAM sequence: TTT
tcttcgagtgctcttctgat

SEQ ID NO: 405544 - DNA, 20 bp, Artificial Sequence
  Description of Artificial Sequence: Synthetic oligonucleotide
  Target: LAMA2; (+) strand; PAM type: YTN; PAM sequence: TTT
cttcgagtgctcttctgatg

SEQ ID NO: 405545 - DNA, 20 bp, Artificial Sequence
  Description of Artificial Sequence: Synthetic oligonucleotide
  Target: LAMA2; (+) strand; PAM type: YTN; PAM sequence: TTC
ttcgagtgctcttctgatgt

SEQ ID NO: 405546 - DNA, 20 bp, Artificial Sequence
  Description of Artificial Sequence: Synthetic oligonucleotide
  Target: LAMA2; (+) strand; PAM type: YTN; PAM sequence: CTT
cgagtgctcttctgatgtat

SEQ ID NO: 405547 - DNA, 20 bp, Artificial Sequence
  Description of Artificial Sequence: Synthetic oligonucleotide
  Target: LAMA2; (+) strand; PAM type: YTN; PAM sequence: TTC
gagtgctcttctgatgtatc

SEQ ID NO: 405548 - DNA, 20 bp, Artificial Sequence
  Description of Artificial Sequence: Synthetic oligonucleotide
  Target: LAMA2; (+) strand; PAM type: YTN; PAM sequence: CTC
ttctgatgtatcttgccaca

SEQ ID NO: 405549 - DNA, 20 bp, Artificial Sequence
  Description of Artificial Sequence: Synthetic oligonucleotide
  Target: LAMA2; (+) strand; PAM type: YTN; PAM sequence: CTT
ctgatgtatcttgccacacg

SEQ ID NO: 405550 - DNA, 20 bp, Artificial Sequence
  Description of Artificial Sequence: Synthetic oligonucleotide
  Target: LAMA2; (+) strand; PAM type: YTN; PAM sequence: TTC
tgatgtatcttgccacacga

SEQ ID NO: 405551 - DNA, 20 bp, Artificial Sequence
  Description of Artificial Sequence: Synthetic oligonucleotide
  Target: LAMA2; (+) strand; PAM type: YTN; PAM sequence: CTG
atgtatcttgccacacgaga

SEQ ID NO: 405552 - DNA, 20 bp, Artificial Sequence
  Description of Artificial Sequence: Synthetic oligonucleotide
  Target: LAMA2; (+) strand; PAM type: YTN; PAM sequence: CTT
gccacacgagacctggtaaa

SEQ ID NO: 405553 - DNA, 20 bp, Artificial Sequence
  Description of Artificial Sequence: Synthetic oligonucleotide
  Target: LAMA2; (+) strand; PAM type: YTN; PAM sequence: TTG
ccacacgagacctggtaaag

SEQ ID NO: 405554 - DNA, 20 bp, Artificial Sequence
  Description of Artificial Sequence: Synthetic oligonucleotide
  Target: LAMA2; (+) strand; PAM type: YTN; PAM sequence: CTG
gtaaagatcatatgcatagc

SEQ ID NO: 405555 - DNA, 20 bp, Artificial Sequence
  Description of Artificial Sequence: Synthetic oligonucleotide
  Target: LAMA2; (+) strand; PAM type: YTN; PAM sequence: TTT
ccgtgactaaaatgcgtttg

SEQ ID NO: 405556 - DNA, 20 bp, Artificial Sequence
  Description of Artificial Sequence: Synthetic oligonucleotide
  Target: LAMA2; (+) strand; PAM type: YTN; PAM sequence: TTC
cgtgactaaaatgcgtttgc

SEQ ID NO: 405557 - DNA, 20 bp, Artificial Sequence
  Description of Artificial Sequence: Synthetic oligonucleotide
  Target: LAMA2; (+) strand; PAM type: YTN; PAM sequence: CTA
aaatgcgtttgcttctttta

SEQ ID NO: 405558 - DNA, 20 bp, Artificial Sequence
  Description of Artificial Sequence: Synthetic oligonucleotide
  Target: LAMA2; (+) strand; PAM type: YTN; PAM sequence: TTT
gcttcttttatcagttattg

SEQ ID NO: 405559 - DNA, 20 bp, Artificial Sequence
  Description of Artificial Sequence: Synthetic oligonucleotide
  Target: LAMA2; (+) strand; PAM type: YTN; PAM sequence: TTG
cttcttttatcagttattgg

SEQ ID NO: 405560 - DNA, 20 bp, Artificial Sequence
  Description of Artificial Sequence: Synthetic oligonucleotide
  Target: LAMA2; (+) strand; PAM type: YTN; PAM sequence: CTT
cttttatcagttattggtaa

SEQ ID NO: 405561 - DNA, 20 bp, Artificial Sequence
  Description of Artificial Sequence: Synthetic oligonucleotide
  Target: LAMA2; (+) strand; PAM type: YTN; PAM sequence: TTC
ttttatcagttattggtaaa

SEQ ID NO: 405562 - DNA, 20 bp, Artificial Sequence
  Description of Artificial Sequence: Synthetic oligonucleotide
  Target: LAMA2; (+) strand; PAM type: YTN; PAM sequence: CTT
ttatcagttattggtaaaat

SEQ ID NO: 405563 - DNA, 20 bp, Artificial Sequence
  Description of Artificial Sequence: Synthetic oligonucleotide
  Target: LAMA2; (+) strand; PAM type: YTN; PAM sequence: TTT
tatcagttattggtaaaatc

SEQ ID NO: 405564 - DNA, 20 bp, Artificial Sequence
  Description of Artificial Sequence: Synthetic oligonucleotide
  Target: LAMA2; (+) strand; PAM type: YTN; PAM sequence: TTT
atcagttattggtaaaatca

SEQ ID NO: 405565 - DNA, 20 bp, Artificial Sequence
  Description of Artificial Sequence: Synthetic oligonucleotide
  Target: LAMA2; (+) strand; PAM type: YTN; PAM sequence: TTA
tcagttattggtaaaatcat

SEQ ID NO: 405566 - DNA, 20 bp, Artificial Sequence
  Description of Artificial Sequence: Synthetic oligonucleotide
  Target: LAMA2; (+) strand; PAM type: YTN; PAM sequence: TTA
ttggtaaaatcatcagttat

SEQ ID NO: 405567 - DNA, 20 bp, Artificial Sequence
  Description of Artificial Sequence: Synthetic oligonucleotide
  Target: LAMA2; (+) strand; PAM type: YTN; PAM sequence: TTG
gtaaaatcatcagttattgg

SEQ ID NO: 405568 - DNA, 20 bp, Artificial Sequence
  Description of Artificial Sequence: Synthetic oligonucleotide
  Target: LAMA2; (+) strand; PAM type: YTN; PAM sequence: TTA
ttggtaaaattatcagttat

SEQ ID NO: 405569 - DNA, 20 bp, Artificial Sequence
  Description of Artificial Sequence: Synthetic oligonucleotide
  Target: LAMA2; (+) strand; PAM type: YTN; PAM sequence: TTG
gtaaaattatcagttatttt

SEQ ID NO: 405570 - DNA, 20 bp, Artificial Sequence
  Description of Artificial Sequence: Synthetic oligonucleotide
  Target: LAMA2; (+) strand; PAM type: YTN; PAM sequence: TTA
tcagttattttctaaaaagc

SEQ ID NO: 405571 - DNA, 20 bp, Artificial Sequence
  Description of Artificial Sequence: Synthetic oligonucleotide
  Target: LAMA2; (+) strand; PAM type: YTN; PAM sequence: TTA
ttttctaaaaagcctgggat

SEQ ID NO: 405572 - DNA, 20 bp, Artificial Sequence
  Description of Artificial Sequence: Synthetic oligonucleotide
  Target: LAMA2; (+) strand; PAM type: YTN; PAM sequence: TTT
tctaaaaagcctgggatgat

SEQ ID NO: 405573 - DNA, 20 bp, Artificial Sequence
  Description of Artificial Sequence: Synthetic oligonucleotide
  Target: LAMA2; (+) strand; PAM type: YTN; PAM sequence: TTT
ctaaaaagcctgggatgatt

SEQ ID NO: 405574 - DNA, 20 bp, Artificial Sequence
  Description of Artificial Sequence: Synthetic oligonucleotide
  Target: LAMA2; (+) strand; PAM type: YTN; PAM sequence: TTC
taaaaagcctgggatgattg

SEQ ID NO: 405575 - DNA, 20 bp, Artificial Sequence
  Description of Artificial Sequence: Synthetic oligonucleotide
  Target: LAMA2; (+) strand; PAM type: YTN; PAM sequence: CTA
aaaagcctgggatgattgtc

SEQ ID NO: 405576 - DNA, 20 bp, Artificial Sequence
  Description of Artificial Sequence: Synthetic oligonucleotide
  Target: LAMA2; (+) strand; PAM type: YTN; PAM sequence: CTG
ggatgattgtctggcagcca

SEQ ID NO: 405577 - DNA, 20 bp, Artificial Sequence
  Description of Artificial Sequence: Synthetic oligonucleotide
  Target: LAMA2; (+) strand; PAM type: YTN; PAM sequence: TTG
tctggcagccaagaatgggt

SEQ ID NO: 405578 - DNA, 20 bp, Artificial Sequence
  Description of Artificial Sequence: Synthetic oligonucleotide
  Target: LAMA2; (+) strand; PAM type: YTN; PAM sequence: CTG
gcagccaagaatgggtgata

SEQ ID NO: 405579 - DNA, 20 bp, Artificial Sequence
  Description of Artificial Sequence: Synthetic oligonucleotide
  Target: LAMA2; (+) strand; PAM type: YTN; PAM sequence: CTT
atatattttcaataataact

SEQ ID NO: 405580 - DNA, 20 bp, Artificial Sequence
  Description of Artificial Sequence: Synthetic oligonucleotide
  Target: LAMA2; (+) strand; PAM type: YTN; PAM sequence: TTA
tatattttcaataataactt

SEQ ID NO: 405581 - DNA, 20 bp, Artificial Sequence
  Description of Artificial Sequence: Synthetic oligonucleotide
  Target: LAMA2; (+) strand; PAM type: YTN; PAM sequence: TTT
tcaataataactttaatcac

SEQ ID NO: 405582 - DNA, 20 bp, Artificial Sequence
  Description of Artificial Sequence: Synthetic oligonucleotide
  Target: LAMA2; (+) strand; PAM type: YTN; PAM sequence: TTT
caataataactttaatcaca

SEQ ID NO: 405583 - DNA, 20 bp, Artificial Sequence
  Description of Artificial Sequence: Synthetic oligonucleotide
  Target: LAMA2; (+) strand; PAM type: YTN; PAM sequence: TTC
aataataactttaatcacag

SEQ ID NO: 405584 - DNA, 20 bp, Artificial Sequence
  Description of Artificial Sequence: Synthetic oligonucleotide
  Target: LAMA2; (+) strand; PAM type: YTN; PAM sequence: CTT
taatcacagatacaatttaa

SEQ ID NO: 405585 - DNA, 20 bp, Artificial Sequence
  Description of Artificial Sequence: Synthetic oligonucleotide
  Target: LAMA2; (+) strand; PAM type: YTN; PAM sequence: TTT
aatcacagatacaatttaat

SEQ ID NO: 405586 - DNA, 20 bp, Artificial Sequence
  Description of Artificial Sequence: Synthetic oligonucleotide
  Target: LAMA2; (+) strand; PAM type: YTN; PAM sequence: TTA
atcacagatacaatttaatt

SEQ ID NO: 405587 - DNA, 20 bp, Artificial Sequence
  Description of Artificial Sequence: Synthetic oligonucleotide
  Target: LAMA2; (+) strand; PAM type: YTN; PAM sequence: TTT
aattactatttattttcaat

SEQ ID NO: 405588 - DNA, 20 bp, Artificial Sequence
  Description of Artificial Sequence: Synthetic oligonucleotide
  Target: LAMA2; (+) strand; PAM type: YTN; PAM sequence: TTA
attactatttattttcaata

SEQ ID NO: 405589 - DNA, 20 bp, Artificial Sequence
  Description of Artificial Sequence: Synthetic oligonucleotide
  Target: LAMA2; (+) strand; PAM type: YTN; PAM sequence: TTA
ctatttattttcaatacaac

SEQ ID NO: 405590 - DNA, 20 bp, Artificial Sequence
  Description of Artificial Sequence: Synthetic oligonucleotide
  Target: LAMA2; (+) strand; PAM type: YTN; PAM sequence: CTA
tttattttcaatacaactcc

SEQ ID NO: 405591 - DNA, 20 bp, Artificial Sequence
  Description of Artificial Sequence: Synthetic oligonucleotide
  Target: LAMA2; (+) strand; PAM type: YTN; PAM sequence: TTT
attttcaatacaactcccca

SEQ ID NO: 405592 - DNA, 20 bp, Artificial Sequence
  Description of Artificial Sequence: Synthetic oligonucleotide
  Target: LAMA2; (+) strand; PAM type: YTN; PAM sequence: TTA
ttttcaatacaactccccac

SEQ ID NO: 405593 - DNA, 20 bp, Artificial Sequence
  Description of Artificial Sequence: Synthetic oligonucleotide
  Target: LAMA2; (+) strand; PAM type: YTN; PAM sequence: TTT
tcaatacaactccccacata

SEQ ID NO: 405594 - DNA, 20 bp, Artificial Sequence
  Description of Artificial Sequence: Synthetic oligonucleotide
  Target: LAMA2; (+) strand; PAM type: YTN; PAM sequence: TTT
caatacaactccccacataa

SEQ ID NO: 405595 - DNA, 20 bp, Artificial Sequence
  Description of Artificial Sequence: Synthetic oligonucleotide
  Target: LAMA2; (+) strand; PAM type: YTN; PAM sequence: TTC
aatacaactccccacataat

SEQ ID NO: 405596 - DNA, 20 bp, Artificial Sequence
  Description of Artificial Sequence: Synthetic oligonucleotide
  Target: LAMA2; (+) strand; PAM type: YTN; PAM sequence: CTC
cccacataatcctttaagca

SEQ ID NO: 405597 - DNA, 20 bp, Artificial Sequence
  Description of Artificial Sequence: Synthetic oligonucleotide
  Target: LAMA2; (+) strand; PAM type: YTN; PAM sequence: CTT
taagcaatacatccggtaat

SEQ ID NO: 405598 - DNA, 20 bp, Artificial Sequence
  Description of Artificial Sequence: Synthetic oligonucleotide
  Target: LAMA2; (+) strand; PAM type: YTN; PAM sequence: TTT
aagcaatacatccggtaata

SEQ ID NO: 405599 - DNA, 20 bp, Artificial Sequence
  Description of Artificial Sequence: Synthetic oligonucleotide
  Target: LAMA2; (+) strand; PAM type: YTN; PAM sequence: TTA
agcaatacatccggtaataa

SEQ ID NO: 405600 - DNA, 20 bp, Artificial Sequence
  Description of Artificial Sequence: Synthetic oligonucleotide
  Target: LAMA2; (+) strand; PAM type: YTN; PAM sequence: TTT
ttcccagcatggagccatac

SEQ ID NO: 405601 - DNA, 20 bp, Artificial Sequence
  Description of Artificial Sequence: Synthetic oligonucleotide
  Target: LAMA2; (+) strand; PAM type: YTN; PAM sequence: TTT
tcccagcatggagccataca

SEQ ID NO: 405602 - DNA, 20 bp, Artificial Sequence
  Description of Artificial Sequence: Synthetic oligonucleotide
  Target: LAMA2; (+) strand; PAM type: YTN; PAM sequence: TTT
cccagcatggagccatacag

SEQ ID NO: 405603 - DNA, 20 bp, Artificial Sequence
  Description of Artificial Sequence: Synthetic oligonucleotide
  Target: LAMA2; (+) strand; PAM type: YTN; PAM sequence: TTC
ccagcatggagccatacagc

SEQ ID NO: 405604 - DNA, 20 bp, Artificial Sequence
  Description of Artificial Sequence: Synthetic oligonucleotide
  Target: LAMA2; (+) strand; PAM type: YTN; PAM sequence: CTT
ccttaatcttctttcagaga

SEQ ID NO: 405605 - DNA, 20 bp, Artificial Sequence
  Description of Artificial Sequence: Synthetic oligonucleotide
  Target: LAMA2; (+) strand; PAM type: YTN; PAM sequence: TTC
cttaatcttctttcagagac

SEQ ID NO: 405606 - DNA, 20 bp, Artificial Sequence
  Description of Artificial Sequence: Synthetic oligonucleotide
  Target: LAMA2; (+) strand; PAM type: YTN; PAM sequence: CTT
aatcttctttcagagacctg

SEQ ID NO: 405607 - DNA, 20 bp, Artificial Sequence
  Description of Artificial Sequence: Synthetic oligonucleotide
  Target: LAMA2; (+) strand; PAM type: YTN; PAM sequence: TTA
atcttctttcagagacctga

SEQ ID NO: 405608 - DNA, 20 bp, Artificial Sequence
  Description of Artificial Sequence: Synthetic oligonucleotide
  Target: LAMA2; (+) strand; PAM type: YTN; PAM sequence: CTT
ctttcagagacctgagttga

SEQ ID NO: 405609 - DNA, 20 bp, Artificial Sequence
  Description of Artificial Sequence: Synthetic oligonucleotide
  Target: LAMA2; (+) strand; PAM type: YTN; PAM sequence: TTC
tttcagagacctgagttgaa

SEQ ID NO: 405610 - DNA, 20 bp, Artificial Sequence
  Description of Artificial Sequence: Synthetic oligonucleotide
  Target: LAMA2; (+) strand; PAM type: YTN; PAM sequence: CTT
tcagagacctgagttgaaaa

SEQ ID NO: 405611 - DNA, 20 bp, Artificial Sequence
  Description of Artificial Sequence: Synthetic oligonucleotide
  Target: LAMA2; (+) strand; PAM type: YTN; PAM sequence: TTT
cagagacctgagttgaaaag

SEQ ID NO: 405612 - DNA, 20 bp, Artificial Sequence
  Description of Artificial Sequence: Synthetic oligonucleotide
  Target: LAMA2; (+) strand; PAM type: YTN; PAM sequence: TTC
agagacctgagttgaaaagg

SEQ ID NO: 405613 - DNA, 20 bp, Artificial Sequence
  Description of Artificial Sequence: Synthetic oligonucleotide
  Target: LAMA2; (+) strand; PAM type: YTN; PAM sequence: CTG
agttgaaaaggtgattataa

SEQ ID NO: 405614 - DNA, 20 bp, Artificial Sequence
  Description of Artificial Sequence: Synthetic oligonucleotide
  Target: LAMA2; (+) strand; PAM type: YTN; PAM sequence: TTG
aaaaggtgattataagtatt

SEQ ID NO: 405615 - DNA, 20 bp, Artificial Sequence
  Description of Artificial Sequence: Synthetic oligonucleotide
  Target: LAMA2; (+) strand; PAM type: YTN; PAM sequence: TTA
taagtattctttggcctcat

SEQ ID NO: 405616 - DNA, 20 bp, Artificial Sequence
  Description of Artificial Sequence: Synthetic oligonucleotide
  Target: LAMA2; (+) strand; PAM type: YTN; PAM sequence: TTC
tttggcctcatttttttctg

SEQ ID NO: 405617 - DNA, 20 bp, Artificial Sequence
  Description of Artificial Sequence: Synthetic oligonucleotide
  Target: LAMA2; (+) strand; PAM type: YTN; PAM sequence: CTT
tggcctcatttttttctggt

SEQ ID NO: 405618 - DNA, 20 bp, Artificial Sequence
  Description of Artificial Sequence: Synthetic oligonucleotide
  Target: LAMA2; (+) strand; PAM type: YTN; PAM sequence: TTT
ggcctcatttttttctggtc

SEQ ID NO: 405619 - DNA, 20 bp, Artificial Sequence
  Description of Artificial Sequence: Synthetic oligonucleotide
  Target: LAMA2; (+) strand; PAM type: YTN; PAM sequence: TTG
gcctcatttttttctggtca

SEQ ID NO: 405620 - DNA, 20 bp, Artificial Sequence
  Description of Artificial Sequence: Synthetic oligonucleotide
  Target: LAMA2; (+) strand; PAM type: YTN; PAM sequence: CTC
atttttttctggtcagtatt

SEQ ID NO: 405621 - DNA, 20 bp, Artificial Sequence
  Description of Artificial Sequence: Synthetic oligonucleotide
  Target: LAMA2; (+) strand; PAM type: YTN; PAM sequence: TTT
ttttctggtcagtatttctt

SEQ ID NO: 405622 - DNA, 20 bp, Artificial Sequence
  Description of Artificial Sequence: Synthetic oligonucleotide
  Target: LAMA2; (+) strand; PAM type: YTN; PAM sequence: TTT
tttctggtcagtatttctta

SEQ ID NO: 405623 - DNA, 20 bp, Artificial Sequence
  Description of Artificial Sequence: Synthetic oligonucleotide
  Target: LAMA2; (+) strand; PAM type: YTN; PAM sequence: TTT
ttctggtcagtatttcttac

SEQ ID NO: 405624 - DNA, 20 bp, Artificial Sequence
  Description of Artificial Sequence: Synthetic oligonucleotide
  Target: LAMA2; (+) strand; PAM type: YTN; PAM sequence: TTT
tctggtcagtatttcttact

SEQ ID NO: 405625 - DNA, 20 bp, Artificial Sequence
  Description of Artificial Sequence: Synthetic oligonucleotide
  Target: LAMA2; (+) strand; PAM type: YTN; PAM sequence: TTT
ctggtcagtatttcttactg

SEQ ID NO: 405626 - DNA, 20 bp, Artificial Sequence
  Description of Artificial Sequence: Synthetic oligonucleotide
  Target: LAMA2; (+) strand; PAM type: YTN; PAM sequence: TTC
tggtcagtatttcttactga

SEQ ID NO: 405627 - DNA, 20 bp, Artificial Sequence
  Description of Artificial Sequence: Synthetic oligonucleotide
  Target: LAMA2; (+) strand; PAM type: YTN; PAM sequence: CTG
gtcagtatttcttactgaat

SEQ ID NO: 405628 - DNA, 20 bp, Artificial Sequence
  Description of Artificial Sequence: Synthetic oligonucleotide
  Target: LAMA2; (+) strand; PAM type: YTN; PAM sequence: TTT
cttactgaattctttctggg

SEQ ID NO: 405629 - DNA, 20 bp, Artificial Sequence
  Description of Artificial Sequence: Synthetic oligonucleotide
  Target: LAMA2; (+) strand; PAM type: YTN; PAM sequence: TTC
ttactgaattctttctggga

SEQ ID NO: 405630 - DNA, 20 bp, Artificial Sequence
  Description of Artificial Sequence: Synthetic oligonucleotide
  Target: LAMA2; (+) strand; PAM type: YTN; PAM sequence: CTT
actgaattctttctgggaac

SEQ ID NO: 405631 - DNA, 20 bp, Artificial Sequence
  Description of Artificial Sequence: Synthetic oligonucleotide
  Target: LAMA2; (+) strand; PAM type: YTN; PAM sequence: TTA
ctgaattctttctgggaaca

SEQ ID NO: 405632 - DNA, 20 bp, Artificial Sequence
  Description of Artificial Sequence: Synthetic oligonucleotide
  Target: LAMA2; (+) strand; PAM type: YTN; PAM sequence: CTG
aattctttctgggaacatac

SEQ ID NO: 405633 - DNA, 20 bp, Artificial Sequence
  Description of Artificial Sequence: Synthetic oligonucleotide
  Target: LAMA2; (+) strand; PAM type: YTN; PAM sequence: TTC
tttctgggaacatacctttt

SEQ ID NO: 405634 - DNA, 20 bp, Artificial Sequence
  Description of Artificial Sequence: Synthetic oligonucleotide
  Target: LAMA2; (+) strand; PAM type: YTN; PAM sequence: CTT
tctgggaacataccttttgg

SEQ ID NO: 405635 - DNA, 20 bp, Artificial Sequence
  Description of Artificial Sequence: Synthetic oligonucleotide
  Target: LAMA2; (+) strand; PAM type: YTN; PAM sequence: TTT
ctgggaacataccttttggt

SEQ ID NO: 405636 - DNA, 20 bp, Artificial Sequence
  Description of Artificial Sequence: Synthetic oligonucleotide
  Target: LAMA2; (+) strand; PAM type: YTN; PAM sequence: TTC
tgggaacataccttttggtt

SEQ ID NO: 405637 - DNA, 20 bp, Artificial Sequence
  Description of Artificial Sequence: Synthetic oligonucleotide
  Target: LAMA2; (+) strand; PAM type: YTN; PAM sequence: CTG
ggaacataccttttggttca

SEQ ID NO: 405638 - DNA, 20 bp, Artificial Sequence
  Description of Artificial Sequence: Synthetic oligonucleotide
  Target: LAMA2; (+) strand; PAM type: YTN; PAM sequence: CTT
ttggttcacttaatatgttt

SEQ ID NO: 405639 - DNA, 20 bp, Artificial Sequence
  Description of Artificial Sequence: Synthetic oligonucleotide
  Target: LAMA2; (+) strand; PAM type: YTN; PAM sequence: TTT
tggttcacttaatatgtttt

SEQ ID NO: 405640 - DNA, 20 bp, Artificial Sequence
  Description of Artificial Sequence: Synthetic oligonucleotide
  Target: LAMA2; (+) strand; PAM type: YTN; PAM sequence: TTT
ggttcacttaatatgttttc

SEQ ID NO: 405641 - DNA, 20 bp, Artificial Sequence
  Description of Artificial Sequence: Synthetic oligonucleotide
  Target: LAMA2; (+) strand; PAM type: YTN; PAM sequence: TTG
gttcacttaatatgttttca

SEQ ID NO: 405642 - DNA, 20 bp, Artificial Sequence
  Description of Artificial Sequence: Synthetic oligonucleotide
  Target: LAMA2; (+) strand; PAM type: YTN; PAM sequence: TTC
acttaatatgttttcaaatg

SEQ ID NO: 405643 - DNA, 20 bp, Artificial Sequence
  Description of Artificial Sequence: Synthetic oligonucleotide
  Target: LAMA2; (+) strand; PAM type: YTN; PAM sequence: CTT
aatatgttttcaaatgaact

SEQ ID NO: 405644 - DNA, 20 bp, Artificial Sequence
  Description of Artificial Sequence: Synthetic oligonucleotide
  Target: LAMA2; (+) strand; PAM type: YTN; PAM sequence: TTA
atatgttttcaaatgaactc

SEQ ID NO: 405645 - DNA, 20 bp, Artificial Sequence
  Description of Artificial Sequence: Synthetic oligonucleotide
  Target: LAMA2; (+) strand; PAM type: YTN; PAM sequence: TTT
tcaaatgaactcacatttta

SEQ ID NO: 405646 - DNA, 20 bp, Artificial Sequence
  Description of Artificial Sequence: Synthetic oligonucleotide
  Target: LAMA2; (+) strand; PAM type: YTN; PAM sequence: TTT
caaatgaactcacattttac

SEQ ID NO: 405647 - DNA, 20 bp, Artificial Sequence
  Description of Artificial Sequence: Synthetic oligonucleotide
  Target: LAMA2; (+) strand; PAM type: YTN; PAM sequence: TTC
aaatgaactcacattttacg

SEQ ID NO: 405648 - DNA, 20 bp, Artificial Sequence
  Description of Artificial Sequence: Synthetic oligonucleotide
  Target: LAMA2; (+) strand; PAM type: YTN; PAM sequence: CTC
acattttacgactgtaataa

SEQ ID NO: 405649 - DNA, 20 bp, Artificial Sequence
  Description of Artificial Sequence: Synthetic oligonucleotide
  Target: LAMA2; (+) strand; PAM type: YTN; PAM sequence: TTT
tacgactgtaataaaaggat

SEQ ID NO: 405650 - DNA, 20 bp, Artificial Sequence
  Description of Artificial Sequence: Synthetic oligonucleotide
  Target: LAMA2; (+) strand; PAM type: YTN; PAM sequence: TTT
acgactgtaataaaaggata

SEQ ID NO: 405651 - DNA, 20 bp, Artificial Sequence
  Description of Artificial Sequence: Synthetic oligonucleotide
  Target: LAMA2; (+) strand; PAM type: YTN; PAM sequence: TTA
cgactgtaataaaaggatat

SEQ ID NO: 405652 - DNA, 20 bp, Artificial Sequence
  Description of Artificial Sequence: Synthetic oligonucleotide
  Target: LAMA2; (+) strand; PAM type: YTN; PAM sequence: CTG
taataaaaggatatgtctta

SEQ ID NO: 405653 - DNA, 20 bp, Artificial Sequence
  Description of Artificial Sequence: Synthetic oligonucleotide
  Target: LAMA2; (+) strand; PAM type: YTN; PAM sequence: CTT
agaaattttgttgtgaccat

SEQ ID NO: 405654 - DNA, 20 bp, Artificial Sequence
  Description of Artificial Sequence: Synthetic oligonucleotide
  Target: LAMA2; (+) strand; PAM type: YTN; PAM sequence: TTA
gaaattttgttgtgaccatg

SEQ ID NO: 405655 - DNA, 20 bp, Artificial Sequence
  Description of Artificial Sequence: Synthetic oligonucleotide
  Target: LAMA2; (+) strand; PAM type: YTN; PAM sequence: TTT
tgttgtgaccatgtgcatca

SEQ ID NO: 405656 - DNA, 20 bp, Artificial Sequence
  Description of Artificial Sequence: Synthetic oligonucleotide
  Target: LAMA2; (+) strand; PAM type: YTN; PAM sequence: TTT
gttgtgaccatgtgcatcat

SEQ ID NO: 405657 - DNA, 20 bp, Artificial Sequence
  Description of Artificial Sequence: Synthetic oligonucleotide
  Target: LAMA2; (+) strand; PAM type: YTN; PAM sequence: TTG
ttgtgaccatgtgcatcata

SEQ ID NO: 405658 - DNA, 20 bp, Artificial Sequence
  Description of Artificial Sequence: Synthetic oligonucleotide
  Target: LAMA2; (+) strand; PAM type: YTN; PAM sequence: TTG
tgaccatgtgcatcataata

SEQ ID NO: 405659 - DNA, 20 bp, Artificial Sequence
  Description of Artificial Sequence: Synthetic oligonucleotide
  Target: LAMA2; (+) strand; PAM type: YTN; PAM sequence: TTC
agaaaatagtaacaccaatt

SEQ ID NO: 405660 - DNA, 20 bp, Artificial Sequence
  Description of Artificial Sequence: Synthetic oligonucleotide
  Target: LAMA2; (+) strand; PAM type: YTN; PAM sequence: TTC
tattttcaaaatggatttct

SEQ ID NO: 405661 - DNA, 20 bp, Artificial Sequence
  Description of Artificial Sequence: Synthetic oligonucleotide
  Target: LAMA2; (+) strand; PAM type: YTN; PAM sequence: CTA
ttttcaaaatggatttctgc

SEQ ID NO: 405662 - DNA, 20 bp, Artificial Sequence
  Description of Artificial Sequence: Synthetic oligonucleotide
  Target: LAMA2; (+) strand; PAM type: YTN; PAM sequence: TTT
tcaaaatggatttctgcaac

SEQ ID NO: 405663 - DNA, 20 bp, Artificial Sequence
  Description of Artificial Sequence: Synthetic oligonucleotide
  Target: LAMA2; (+) strand; PAM type: YTN; PAM sequence: TTT
caaaatggatttctgcaaca

SEQ ID NO: 405664 - DNA, 20 bp, Artificial Sequence
  Description of Artificial Sequence: Synthetic oligonucleotide
  Target: LAMA2; (+) strand; PAM type: YTN; PAM sequence: TTC
aaaatggatttctgcaacag

SEQ ID NO: 405665 - DNA, 20 bp, Artificial Sequence
  Description of Artificial Sequence: Synthetic oligonucleotide
  Target: LAMA2; (+) strand; PAM type: YTN; PAM sequence: TTT
ctgcaacagagtgacatatt

SEQ ID NO: 405666 - DNA, 20 bp, Artificial Sequence
  Description of Artificial Sequence: Synthetic oligonucleotide
  Target: LAMA2; (+) strand; PAM type: YTN; PAM sequence: TTC
tgcaacagagtgacatattc

SEQ ID NO: 405667 - DNA, 20 bp, Artificial Sequence
  Description of Artificial Sequence: Synthetic oligonucleotide
  Target: LAMA2; (+) strand; PAM type: YTN; PAM sequence: CTG
caacagagtgacatattcag

SEQ ID NO: 405668 - DNA, 20 bp, Artificial Sequence
  Description of Artificial Sequence: Synthetic oligonucleotide
  Target: LAMA2; (+) strand; PAM type: YTN; PAM sequence: TTC
agcaatttagccacaagacc

SEQ ID NO: 405669 - DNA, 20 bp, Artificial Sequence
  Description of Artificial Sequence: Synthetic oligonucleotide
  Target: LAMA2; (+) strand; PAM type: YTN; PAM sequence: TTT
agccacaagaccctaacata

SEQ ID NO: 405670 - DNA, 20 bp, Artificial Sequence
  Description of Artificial Sequence: Synthetic oligonucleotide
  Target: LAMA2; (+) strand; PAM type: YTN; PAM sequence: TTA
gccacaagaccctaacataa

SEQ ID NO: 405671 - DNA, 20 bp, Artificial Sequence
  Description of Artificial Sequence: Synthetic oligonucleotide
  Target: LAMA2; (+) strand; PAM type: YTN; PAM sequence: CTA
acataaaccacacaagaaaa

SEQ ID NO: 405672 - DNA, 20 bp, Artificial Sequence
  Description of Artificial Sequence: Synthetic oligonucleotide
  Target: LAMA2; (+) strand; PAM type: YTN; PAM sequence: CTC
atatacttctctgtgtatct

SEQ ID NO: 405673 - DNA, 20 bp, Artificial Sequence
  Description of Artificial Sequence: Synthetic oligonucleotide
  Target: LAMA2; (+) strand; PAM type: YTN; PAM sequence: CTT
ctctgtgtatctaaccactg

SEQ ID NO: 405674 - DNA, 20 bp, Artificial Sequence
  Description of Artificial Sequence: Synthetic oligonucleotide
  Target: LAMA2; (+) strand; PAM type: YTN; PAM sequence: TTC
tctgtgtatctaaccactgg

SEQ ID NO: 405675 - DNA, 20 bp, Artificial Sequence
  Description of Artificial Sequence: Synthetic oligonucleotide
  Target: LAMA2; (+) strand; PAM type: YTN; PAM sequence: CTC
tgtgtatctaaccactgggg

SEQ ID NO: 405676 - DNA, 20 bp, Artificial Sequence
  Description of Artificial Sequence: Synthetic oligonucleotide
  Target: LAMA2; (+) strand; PAM type: YTN; PAM sequence: CTG
tgtatctaaccactggggta

SEQ ID NO: 405677 - DNA, 20 bp, Artificial Sequence
  Description of Artificial Sequence: Synthetic oligonucleotide
  Target: LAMA2; (+) strand; PAM type: YTN; PAM sequence: CTA
accactggggtatgtttact

SEQ ID NO: 405678 - DNA, 20 bp, Artificial Sequence
  Description of Artificial Sequence: Synthetic oligonucleotide
  Target: LAMA2; (+) strand; PAM type: YTN; PAM sequence: CTG
gggtatgtttactctattaa

SEQ ID NO: 405679 - DNA, 20 bp, Artificial Sequence
  Description of Artificial Sequence: Synthetic oligonucleotide
  Target: LAMA2; (+) strand; PAM type: YTN; PAM sequence: TTT
actctattaatagagagatt

SEQ ID NO: 405680 - DNA, 20 bp, Artificial Sequence
  Description of Artificial Sequence: Synthetic oligonucleotide
  Target: LAMA2; (+) strand; PAM type: YTN; PAM sequence: TTA
ctctattaatagagagattt

SEQ ID NO: 405681 - DNA, 20 bp, Artificial Sequence
  Description of Artificial Sequence: Synthetic oligonucleotide
  Target: LAMA2; (+) strand; PAM type: YTN; PAM sequence: CTC
tattaatagagagatttcat

SEQ ID NO: 405682 - DNA, 20 bp, Artificial Sequence
  Description of Artificial Sequence: Synthetic oligonucleotide
  Target: LAMA2; (+) strand; PAM type: YTN; PAM sequence: CTA
ttaatagagagatttcatga

SEQ ID NO: 405683 - DNA, 20 bp, Artificial Sequence
  Description of Artificial Sequence: Synthetic oligonucleotide
  Target: LAMA2; (+) strand; PAM type: YTN; PAM sequence: TTA
atagagagatttcatgagtg

SEQ ID NO: 405684 - DNA, 20 bp, Artificial Sequence
  Description of Artificial Sequence: Synthetic oligonucleotide
  Target: LAMA2; (+) strand; PAM type: YTN; PAM sequence: TTT
catgagtgtggagctcactg

SEQ ID NO: 405685 - DNA, 20 bp, Artificial Sequence
  Description of Artificial Sequence: Synthetic oligonucleotide
  Target: LAMA2; (+) strand; PAM type: YTN; PAM sequence: TTC
atgagtgtggagctcactga

SEQ ID NO: 405686 - DNA, 20 bp, Artificial Sequence
  Description of Artificial Sequence: Synthetic oligonucleotide
  Target: LAMA2; (+) strand; PAM type: YTN; PAM sequence: CTC
actgatgggcacataaaagt

SEQ ID NO: 405687 - DNA, 20 bp, Artificial Sequence
  Description of Artificial Sequence: Synthetic oligonucleotide
  Target: LAMA2; (+) strand; PAM type: YTN; PAM sequence: CTG
atgggcacataaaagtcagt

SEQ ID NO: 405688 - DNA, 20 bp, Artificial Sequence
  Description of Artificial Sequence: Synthetic oligonucleotide
  Target: LAMA2; (+) strand; PAM type: YTN; PAM sequence: TTA
cgatctgggctcaggaatgg

SEQ ID NO: 405689 - DNA, 20 bp, Artificial Sequence
  Description of Artificial Sequence: Synthetic oligonucleotide
  Target: LAMA2; (+) strand; PAM type: YTN; PAM sequence: CTG
ggctcaggaatggcttccgt

SEQ ID NO: 405690 - DNA, 20 bp, Artificial Sequence
  Description of Artificial Sequence: Synthetic oligonucleotide
  Target: LAMA2; (+) strand; PAM type: YTN; PAM sequence: CTC
aggaatggcttccgttgtca

SEQ ID NO: 405691 - DNA, 20 bp, Artificial Sequence
  Description of Artificial Sequence: Synthetic oligonucleotide
  Target: LAMA2; (+) strand; PAM type: YTN; PAM sequence: CTT
ccgttgtcagcaatcaaaac

SEQ ID NO: 405692 - DNA, 20 bp, Artificial Sequence
  Description of Artificial Sequence: Synthetic oligonucleotide
  Target: LAMA2; (+) strand; PAM type: YTN; PAM sequence: TTC
cgttgtcagcaatcaaaacc

SEQ ID NO: 405693 - DNA, 20 bp, Artificial Sequence
  Description of Artificial Sequence: Synthetic oligonucleotide
  Target: LAMA2; (+) strand; PAM type: YTN; PAM sequence: TTG
tcagcaatcaaaaccataat

SEQ ID NO: 405694 - DNA, 20 bp, Artificial Sequence
  Description of Artificial Sequence: Synthetic oligonucleotide
  Target: LAMA2; (+) strand; PAM type: YTN; PAM sequence: TTC
actctgtcaagaattcaaaa

SEQ ID NO: 405695 - DNA, 20 bp, Artificial Sequence
  Description of Artificial Sequence: Synthetic oligonucleotide
  Target: LAMA2; (+) strand; PAM type: YTN; PAM sequence: CTC
tgtcaagaattcaaaaacaa

SEQ ID NO: 405696 - DNA, 20 bp, Artificial Sequence
  Description of Artificial Sequence: Synthetic oligonucleotide
  Target: LAMA2; (+) strand; PAM type: YTN; PAM sequence: CTG
tcaagaattcaaaaacaagg

SEQ ID NO: 405697 - DNA, 20 bp, Artificial Sequence
  Description of Artificial Sequence: Synthetic oligonucleotide
  Target: LAMA2; (+) strand; PAM type: YTN; PAM sequence: TTC
aaaaacaaggtgagttttta

SEQ ID NO: 405698 - DNA, 20 bp, Artificial Sequence
  Description of Artificial Sequence: Synthetic oligonucleotide
  Target: LAMA2; (+) strand; PAM type: YTN; PAM sequence: TTT
ttacagtaataatgcaatat

SEQ ID NO: 405699 - DNA, 20 bp, Artificial Sequence
  Description of Artificial Sequence: Synthetic oligonucleotide
  Target: LAMA2; (+) strand; PAM type: YTN; PAM sequence: TTT
tacagtaataatgcaatata

SEQ ID NO: 405700 - DNA, 20 bp, Artificial Sequence
  Description of Artificial Sequence: Synthetic oligonucleotide
  Target: LAMA2; (+) strand; PAM type: YTN; PAM sequence: TTT
acagtaataatgcaatatag

SEQ ID NO: 405701 - DNA, 20 bp, Artificial Sequence
  Description of Artificial Sequence: Synthetic oligonucleotide
  Target: LAMA2; (+) strand; PAM type: YTN; PAM sequence: TTA
cagtaataatgcaatatagg

SEQ ID NO: 405702 - DNA, 20 bp, Artificial Sequence
  Description of Artificial Sequence: Synthetic oligonucleotide
  Target: LAMA2; (+) strand; PAM type: YTN; PAM sequence: CTT
aatcatgaaatccaaagtgc

SEQ ID NO: 405703 - DNA, 20 bp, Artificial Sequence
  Description of Artificial Sequence: Synthetic oligonucleotide
  Target: LAMA2; (+) strand; PAM type: YTN; PAM sequence: TTA
atcatgaaatccaaagtgca

SEQ ID NO: 405704 - DNA, 20 bp, Artificial Sequence
  Description of Artificial Sequence: Synthetic oligonucleotide
  Target: LAMA2; (+) strand; PAM type: YTN; PAM sequence: CTG
atcaagaggaaggctccgtc

SEQ ID NO: 405705 - DNA, 20 bp, Artificial Sequence
  Description of Artificial Sequence: Synthetic oligonucleotide
  Target: LAMA2; (+) strand; PAM type: YTN; PAM sequence: CTC
cgtctataattttagctact

SEQ ID NO: 405706 - DNA, 20 bp, Artificial Sequence
  Description of Artificial Sequence: Synthetic oligonucleotide
  Target: LAMA2; (+) strand; PAM type: YTN; PAM sequence: CTA
taattttagctactcacgag

SEQ ID NO: 405707 - DNA, 20 bp, Artificial Sequence
  Description of Artificial Sequence: Synthetic oligonucleotide
  Target: LAMA2; (+) strand; PAM type: YTN; PAM sequence: TTT
tagctactcacgagttcagt

SEQ ID NO: 405708 - DNA, 20 bp, Artificial Sequence
  Description of Artificial Sequence: Synthetic oligonucleotide
  Target: LAMA2; (+) strand; PAM type: YTN; PAM sequence: TTT
agctactcacgagttcagtg

SEQ ID NO: 405709 - DNA, 20 bp, Artificial Sequence
  Description of Artificial Sequence: Synthetic oligonucleotide
  Target: LAMA2; (+) strand; PAM type: YTN; PAM sequence: TTA
gctactcacgagttcagtga

SEQ ID NO: 405710 - DNA, 20 bp, Artificial Sequence
  Description of Artificial Sequence: Synthetic oligonucleotide
  Target: LAMA2; (+) strand; PAM type: YTN; PAM sequence: CTA
ctcacgagttcagtgaaaaa

SEQ ID NO: 405711 - DNA, 20 bp, Artificial Sequence
  Description of Artificial Sequence: Synthetic oligonucleotide
  Target: LAMA2; (+) strand; PAM type: YTN; PAM sequence: CTC
acgagttcagtgaaaaattt

SEQ ID NO: 405712 - DNA, 20 bp, Artificial Sequence
  Description of Artificial Sequence: Synthetic oligonucleotide
  Target: LAMA2; (+) strand; PAM type: YTN; PAM sequence: TTC
agtgaaaaatttatacagtc

SEQ ID NO: 405713 - DNA, 20 bp, Artificial Sequence
  Description of Artificial Sequence: Synthetic oligonucleotide
  Target: LAMA2; (+) strand; PAM type: YTN; PAM sequence: TTT
atacagtcatttttttggct

SEQ ID NO: 405714 - DNA, 20 bp, Artificial Sequence
  Description of Artificial Sequence: Synthetic oligonucleotide
  Target: LAMA2; (+) strand; PAM type: YTN; PAM sequence: TTA
tacagtcatttttttggctt

SEQ ID NO: 405715 - DNA, 20 bp, Artificial Sequence
  Description of Artificial Sequence: Synthetic oligonucleotide
  Target: LAMA2; (+) strand; PAM type: YTN; PAM sequence: TTT
ttttggcttagattataggt

SEQ ID NO: 405716 - DNA, 20 bp, Artificial Sequence
  Description of Artificial Sequence: Synthetic oligonucleotide
  Target: LAMA2; (+) strand; PAM type: YTN; PAM sequence: TTT
tttggcttagattataggtg

SEQ ID NO: 405717 - DNA, 20 bp, Artificial Sequence
  Description of Artificial Sequence: Synthetic oligonucleotide
  Target: LAMA2; (+) strand; PAM type: YTN; PAM sequence: TTT
ttggcttagattataggtga

SEQ ID NO: 405718 - DNA, 20 bp, Artificial Sequence
  Description of Artificial Sequence: Synthetic oligonucleotide
  Target: LAMA2; (+) strand; PAM type: YTN; PAM sequence: TTT
tggcttagattataggtgat

SEQ ID NO: 405719 - DNA, 20 bp, Artificial Sequence
  Description of Artificial Sequence: Synthetic oligonucleotide
  Target: LAMA2; (+) strand; PAM type: YTN; PAM sequence: TTT
ggcttagattataggtgatt

SEQ ID NO: 405720 - DNA, 20 bp, Artificial Sequence
  Description of Artificial Sequence: Synthetic oligonucleotide
  Target: LAMA2; (+) strand; PAM type: YTN; PAM sequence: TTG
gcttagattataggtgattt

SEQ ID NO: 405721 - DNA, 20 bp, Artificial Sequence
  Description of Artificial Sequence: Synthetic oligonucleotide
  Target: LAMA2; (+) strand; PAM type: YTN; PAM sequence: CTT
agattataggtgatttgggt

SEQ ID NO: 405722 - DNA, 20 bp, Artificial Sequence
  Description of Artificial Sequence: Synthetic oligonucleotide
  Target: LAMA2; (+) strand; PAM type: YTN; PAM sequence: TTA
gattataggtgatttgggtt

SEQ ID NO: 405723 - DNA, 20 bp, Artificial Sequence
  Description of Artificial Sequence: Synthetic oligonucleotide
  Target: LAMA2; (+) strand; PAM type: YTN; PAM sequence: TTA
taggtgatttgggttagaca

SEQ ID NO: 405724 - DNA, 20 bp, Artificial Sequence
  Description of Artificial Sequence: Synthetic oligonucleotide
  Target: LAMA2; (+) strand; PAM type: YTN; PAM sequence: TTT
gggttagacatgactgattg

SEQ ID NO: 405725 - DNA, 20 bp, Artificial Sequence
  Description of Artificial Sequence: Synthetic oligonucleotide
  Target: LAMA2; (+) strand; PAM type: YTN; PAM sequence: TTG
ggttagacatgactgattga

SEQ ID NO: 405726 - DNA, 20 bp, Artificial Sequence
  Description of Artificial Sequence: Synthetic oligonucleotide
  Target: LAMA2; (+) strand; PAM type: YTN; PAM sequence: TTA
gacatgactgattgaagagc

SEQ ID NO: 405727 - DNA, 20 bp, Artificial Sequence
  Description of Artificial Sequence: Synthetic oligonucleotide
  Target: LAMA2; (+) strand; PAM type: YTN; PAM sequence: CTG
attgaagagccaaatgcttc

SEQ ID NO: 405728 - DNA, 20 bp, Artificial Sequence
  Description of Artificial Sequence: Synthetic oligonucleotide
  Target: LAMA2; (+) strand; PAM type: YTN; PAM sequence: TTG
aagagccaaatgcttctcta

SEQ ID NO: 405729 - DNA, 20 bp, Artificial Sequence
  Description of Artificial Sequence: Synthetic oligonucleotide
  Target: LAMA2; (+) strand; PAM type: YTN; PAM sequence: CTT
ctctatcattttcttttgaa

SEQ ID NO: 405730 - DNA, 20 bp, Artificial Sequence
  Description of Artificial Sequence: Synthetic oligonucleotide
  Target: LAMA2; (+) strand; PAM type: YTN; PAM sequence: TTC
tctatcattttcttttgaaa

SEQ ID NO: 405731 - DNA, 20 bp, Artificial Sequence
  Description of Artificial Sequence: Synthetic oligonucleotide
  Target: LAMA2; (+) strand; PAM type: YTN; PAM sequence: CTC
tatcattttcttttgaaact

SEQ ID NO: 405732 - DNA, 20 bp, Artificial Sequence
  Description of Artificial Sequence: Synthetic oligonucleotide
  Target: LAMA2; (+) strand; PAM type: YTN; PAM sequence: CTA
tcattttcttttgaaactga

SEQ ID NO: 405733 - DNA, 20 bp, Artificial Sequence
  Description of Artificial Sequence: Synthetic oligonucleotide
  Target: LAMA2; (+) strand; PAM type: YTN; PAM sequence: TTT
tcttttgaaactgagagctt

SEQ ID NO: 405734 - DNA, 20 bp, Artificial Sequence
  Description of Artificial Sequence: Synthetic oligonucleotide
  Target: LAMA2; (+) strand; PAM type: YTN; PAM sequence: TTT
cttttgaaactgagagctta

SEQ ID NO: 405735 - DNA, 20 bp, Artificial Sequence
  Description of Artificial Sequence: Synthetic oligonucleotide
  Target: LAMA2; (+) strand; PAM type: YTN; PAM sequence: TTC
ttttgaaactgagagcttaa

SEQ ID NO: 405736 - DNA, 20 bp, Artificial Sequence
  Description of Artificial Sequence: Synthetic oligonucleotide
  Target: LAMA2; (+) strand; PAM type: YTN; PAM sequence: CTT
ttgaaactgagagcttaatt

SEQ ID NO: 405737 - DNA, 20 bp, Artificial Sequence
  Description of Artificial Sequence: Synthetic oligonucleotide
  Target: LAMA2; (+) strand; PAM type: YTN; PAM sequence: TTT
tgaaactgagagcttaattt

SEQ ID NO: 405738 - DNA, 20 bp, Artificial Sequence
  Description of Artificial Sequence: Synthetic oligonucleotide
  Target: LAMA2; (+) strand; PAM type: YTN; PAM sequence: TTT
gaaactgagagcttaatttg

SEQ ID NO: 405739 - DNA, 20 bp, Artificial Sequence
  Description of Artificial Sequence: Synthetic oligonucleotide
  Target: LAMA2; (+) strand; PAM type: YTN; PAM sequence: TTG
aaactgagagcttaatttga

SEQ ID NO: 405740 - DNA, 20 bp, Artificial Sequence
  Description of Artificial Sequence: Synthetic oligonucleotide
  Target: LAMA2; (+) strand; PAM type: YTN; PAM sequence: CTG
agagcttaatttgaaagcat

SEQ ID NO: 405741 - DNA, 20 bp, Artificial Sequence
  Description of Artificial Sequence: Synthetic oligonucleotide
  Target: LAMA2; (+) strand; PAM type: YTN; PAM sequence: CTT
aatttgaaagcataaaactg

SEQ ID NO: 405742 - DNA, 20 bp, Artificial Sequence
  Description of Artificial Sequence: Synthetic oligonucleotide
  Target: LAMA2; (+) strand; PAM type: YTN; PAM sequence: TTA
atttgaaagcataaaactgt

SEQ ID NO: 405743 - DNA, 20 bp, Artificial Sequence
  Description of Artificial Sequence: Synthetic oligonucleotide
  Target: LAMA2; (+) strand; PAM type: YTN; PAM sequence: TTT
gaaagcataaaactgtctta

SEQ ID NO: 405744 - DNA, 20 bp, Artificial Sequence
  Description of Artificial Sequence: Synthetic oligonucleotide
  Target: LAMA2; (+) strand; PAM type: YTN; PAM sequence: TTG
aaagcataaaactgtcttac

SEQ ID NO: 405745 - DNA, 20 bp, Artificial Sequence
  Description of Artificial Sequence: Synthetic oligonucleotide
  Target: LAMA2; (+) strand; PAM type: YTN; PAM sequence: CTG
tcttacaacttgcaaaatta

SEQ ID NO: 405746 - DNA, 20 bp, Artificial Sequence
  Description of Artificial Sequence: Synthetic oligonucleotide
  Target: LAMA2; (+) strand; PAM type: YTN; PAM sequence: CTT
acaacttgcaaaattatatc

SEQ ID NO: 405747 - DNA, 20 bp, Artificial Sequence
  Description of Artificial Sequence: Synthetic oligonucleotide
  Target: LAMA2; (+) strand; PAM type: YTN; PAM sequence: TTA
caacttgcaaaattatatcc

SEQ ID NO: 405748 - DNA, 20 bp, Artificial Sequence
  Description of Artificial Sequence: Synthetic oligonucleotide
  Target: LAMA2; (+) strand; PAM type: YTN; PAM sequence: CTT
gcaaaattatatcctgtaat

SEQ ID NO: 405749 - DNA, 20 bp, Artificial Sequence
  Description of Artificial Sequence: Synthetic oligonucleotide
  Target: LAMA2; (+) strand; PAM type: YTN; PAM sequence: TTG
caaaattatatcctgtaata

SEQ ID NO: 405750 - DNA, 20 bp, Artificial Sequence
  Description of Artificial Sequence: Synthetic oligonucleotide
  Target: LAMA2; (+) strand; PAM type: YTN; PAM sequence: TTA
tatcctgtaatatgtttgaa

SEQ ID NO: 405751 - DNA, 20 bp, Artificial Sequence
  Description of Artificial Sequence: Synthetic oligonucleotide
  Target: LAMA2; (+) strand; PAM type: YTN; PAM sequence: CTG
taatatgtttgaaaaatgtt

SEQ ID NO: 405752 - DNA, 20 bp, Artificial Sequence
  Description of Artificial Sequence: Synthetic oligonucleotide
  Target: LAMA2; (+) strand; PAM type: YTN; PAM sequence: TTT
gaaaaatgttgggtgctttt

SEQ ID NO: 405753 - DNA, 20 bp, Artificial Sequence
  Description of Artificial Sequence: Synthetic oligonucleotide
  Target: LAMA2; (+) strand; PAM type: YTN; PAM sequence: TTG
aaaaatgttgggtgcttttc

SEQ ID NO: 405754 - DNA, 20 bp, Artificial Sequence
  Description of Artificial Sequence: Synthetic oligonucleotide
  Target: LAMA2; (+) strand; PAM type: YTN; PAM sequence: TTG
ggtgcttttcttttctccct

SEQ ID NO: 405755 - DNA, 20 bp, Artificial Sequence
  Description of Artificial Sequence: Synthetic oligonucleotide
  Target: LAMA2; (+) strand; PAM type: YTN; PAM sequence: CTT
ttcttttctccctattttgt

SEQ ID NO: 405756 - DNA, 20 bp, Artificial Sequence
  Description of Artificial Sequence: Synthetic oligonucleotide
  Target: LAMA2; (+) strand; PAM type: YTN; PAM sequence: TTT
tcttttctccctattttgtc

SEQ ID NO: 405757 - DNA, 20 bp, Artificial Sequence
  Description of Artificial Sequence: Synthetic oligonucleotide
  Target: LAMA2; (+) strand; PAM type: YTN; PAM sequence: TTT
cttttctccctattttgtca

SEQ ID NO: 405758 - DNA, 20 bp, Artificial Sequence
  Description of Artificial Sequence: Synthetic oligonucleotide
  Target: LAMA2; (+) strand; PAM type: YTN; PAM sequence: TTC
ttttctccctattttgtcaa

SEQ ID NO: 405759 - DNA, 20 bp, Artificial Sequence
  Description of Artificial Sequence: Synthetic oligonucleotide
  Target: LAMA2; (+) strand; PAM type: YTN; PAM sequence: CTT
ttctccctattttgtcaaga

SEQ ID NO: 405760 - DNA, 20 bp, Artificial Sequence
  Description of Artificial Sequence: Synthetic oligonucleotide
  Target: LAMA2; (+) strand; PAM type: YTN; PAM sequence: TTT
tctccctattttgtcaagat

SEQ ID NO: 405761 - DNA, 20 bp, Artificial Sequence
  Description of Artificial Sequence: Synthetic oligonucleotide
  Target: LAMA2; (+) strand; PAM type: YTN; PAM sequence: TTT
ctccctattttgtcaagatg

SEQ ID NO: 405762 - DNA, 20 bp, Artificial Sequence
  Description of Artificial Sequence: Synthetic oligonucleotide
  Target: LAMA2; (+) strand; PAM type: YTN; PAM sequence: TTC
tccctattttgtcaagatgt

SEQ ID NO: 405763 - DNA, 20 bp, Artificial Sequence
  Description of Artificial Sequence: Synthetic oligonucleotide
  Target: LAMA2; (+) strand; PAM type: YTN; PAM sequence: CTC
cctattttgtcaagatgttt

SEQ ID NO: 405764 - DNA, 20 bp, Artificial Sequence
  Description of Artificial Sequence: Synthetic oligonucleotide
  Target: LAMA2; (+) strand; PAM type: YTN; PAM sequence: CTA
ttttgtcaagatgtttcctt

SEQ ID NO: 405765 - DNA, 20 bp, Artificial Sequence
  Description of Artificial Sequence: Synthetic oligonucleotide
  Target: LAMA2; (+) strand; PAM type: YTN; PAM sequence: TTT
tgtcaagatgtttcctttaa

SEQ ID NO: 405766 - DNA, 20 bp, Artificial Sequence
  Description of Artificial Sequence: Synthetic oligonucleotide
  Target: LAMA2; (+) strand; PAM type: YTN; PAM sequence: TTT
gtcaagatgtttcctttaaa

SEQ ID NO: 405767 - DNA, 20 bp, Artificial Sequence
  Description of Artificial Sequence: Synthetic oligonucleotide
  Target: LAMA2; (+) strand; PAM type: YTN; PAM sequence: TTG
tcaagatgtttcctttaaag

SEQ ID NO: 405768 - DNA, 20 bp, Artificial Sequence
  Description of Artificial Sequence: Synthetic oligonucleotide
  Target: LAMA2; (+) strand; PAM type: YTN; PAM sequence: TTT
cctttaaagtggcccacagt

SEQ ID NO: 405769 - DNA, 20 bp, Artificial Sequence
  Description of Artificial Sequence: Synthetic oligonucleotide
  Target: LAMA2; (+) strand; PAM type: YTN; PAM sequence: TTC
ctttaaagtggcccacagtg

SEQ ID NO: 405770 - DNA, 20 bp, Artificial Sequence
  Description of Artificial Sequence: Synthetic oligonucleotide
  Target: LAMA2; (+) strand; PAM type: YTN; PAM sequence: CTT
taaagtggcccacagtggaa

SEQ ID NO: 405771 - DNA, 20 bp, Artificial Sequence
  Description of Artificial Sequence: Synthetic oligonucleotide
  Target: LAMA2; (+) strand; PAM type: YTN; PAM sequence: TTT
aaagtggcccacagtggaat

SEQ ID NO: 405772 - DNA, 20 bp, Artificial Sequence
  Description of Artificial Sequence: Synthetic oligonucleotide
  Target: LAMA2; (+) strand; PAM type: YTN; PAM sequence: TTA
aagtggcccacagtggaatc

SEQ ID NO: 405773 - DNA, 20 bp, Artificial Sequence
  Description of Artificial Sequence: Synthetic oligonucleotide
  Target: LAMA2; (+) strand; PAM type: YTN; PAM sequence: CTA
taggagtggtagggcatagt

SEQ ID NO: 405774 - DNA, 20 bp, Artificial Sequence
  Description of Artificial Sequence: Synthetic oligonucleotide
  Target: LAMA2; (+) strand; PAM type: YTN; PAM sequence: TTA
tcagttctttgctcatttaa

SEQ ID NO: 405775 - DNA, 20 bp, Artificial Sequence
  Description of Artificial Sequence: Synthetic oligonucleotide
  Target: LAMA2; (+) strand; PAM type: YTN; PAM sequence: TTC
tttgctcatttaaattgcca

SEQ ID NO: 405776 - DNA, 20 bp, Artificial Sequence
  Description of Artificial Sequence: Synthetic oligonucleotide
  Target: LAMA2; (+) strand; PAM type: YTN; PAM sequence: CTT
tgctcatttaaattgccaaa

SEQ ID NO: 405777 - DNA, 20 bp, Artificial Sequence
  Description of Artificial Sequence: Synthetic oligonucleotide
  Target: LAMA2; (+) strand; PAM type: YTN; PAM sequence: TTT
gctcatttaaattgccaaac

SEQ ID NO: 405778 - DNA, 20 bp, Artificial Sequence
  Description of Artificial Sequence: Synthetic oligonucleotide
  Target: LAMA2; (+) strand; PAM type: YTN; PAM sequence: TTG
ctcatttaaattgccaaaca

SEQ ID NO: 405779 - DNA, 20 bp, Artificial Sequence
  Description of Artificial Sequence: Synthetic oligonucleotide
  Target: LAMA2; (+) strand; PAM type: YTN; PAM sequence: CTC
atttaaattgccaaacattt

SEQ ID NO: 405780 - DNA, 20 bp, Artificial Sequence
  Description of Artificial Sequence: Synthetic oligonucleotide
  Target: LAMA2; (+) strand; PAM type: YTN; PAM sequence: TTT
aaattgccaaacatttgtat

SEQ ID NO: 405781 - DNA, 20 bp, Artificial Sequence
  Description of Artificial Sequence: Synthetic oligonucleotide
  Target: LAMA2; (+) strand; PAM type: YTN; PAM sequence: TTA
aattgccaaacatttgtatg

SEQ ID NO: 405782 - DNA, 20 bp, Artificial Sequence
  Description of Artificial Sequence: Synthetic oligonucleotide
  Target: LAMA2; (+) strand; PAM type: YTN; PAM sequence: TTG
ccaaacatttgtatgcctgc

SEQ ID NO: 405783 - DNA, 20 bp, Artificial Sequence
  Description of Artificial Sequence: Synthetic oligonucleotide
  Target: LAMA2; (+) strand; PAM type: YTN; PAM sequence: TTT
gtatgcctgcaagtaaataa

SEQ ID NO: 405784 - DNA, 20 bp, Artificial Sequence
  Description of Artificial Sequence: Synthetic oligonucleotide
  Target: LAMA2; (+) strand; PAM type: YTN; PAM sequence: TTG
tatgcctgcaagtaaataat

SEQ ID NO: 405785 - DNA, 20 bp, Artificial Sequence
  Description of Artificial Sequence: Synthetic oligonucleotide
  Target: LAMA2; (+) strand; PAM type: YTN; PAM sequence: CTG
caagtaaataattgatcaat

SEQ ID NO: 405786 - DNA, 20 bp, Artificial Sequence
  Description of Artificial Sequence: Synthetic oligonucleotide
  Target: LAMA2; (+) strand; PAM type: YTN; PAM sequence: TTG
atcaatagtaacatgacatg

SEQ ID NO: 405787 - DNA, 20 bp, Artificial Sequence
  Description of Artificial Sequence: Synthetic oligonucleotide
  Target: LAMA2; (+) strand; PAM type: YTN; PAM sequence: TTT
atgattcggggacattttaa

SEQ ID NO: 405788 - DNA, 20 bp, Artificial Sequence
  Description of Artificial Sequence: Synthetic oligonucleotide
  Target: LAMA2; (+) strand; PAM type: YTN; PAM sequence: TTA
tgattcggggacattttaaa

SEQ ID NO: 405789 - DNA, 20 bp, Artificial Sequence
  Description of Artificial Sequence: Synthetic oligonucleotide
  Target: LAMA2; (+) strand; PAM type: YTN; PAM sequence: TTC
ggggacattttaaaacactt

SEQ ID NO: 405790 - DNA, 20 bp, Artificial Sequence
  Description of Artificial Sequence: Synthetic oligonucleotide
  Target: LAMA2; (+) strand; PAM type: YTN; PAM sequence: TTT
taaaacactttcacaaacat

SEQ ID NO: 405791 - DNA, 20 bp, Artificial Sequence
  Description of Artificial Sequence: Synthetic oligonucleotide
  Target: LAMA2; (+) strand; PAM type: YTN; PAM sequence: TTT
aaaacactttcacaaacatt

SEQ ID NO: 405792 - DNA, 20 bp, Artificial Sequence
  Description of Artificial Sequence: Synthetic oligonucleotide
  Target: LAMA2; (+) strand; PAM type: YTN; PAM sequence: TTA
aaacactttcacaaacattg

SEQ ID NO: 405793 - DNA, 20 bp, Artificial Sequence
  Description of Artificial Sequence: Synthetic oligonucleotide
  Target: LAMA2; (+) strand; PAM type: YTN; PAM sequence: CTT
tcacaaacattgttttatct

SEQ ID NO: 405794 - DNA, 20 bp, Artificial Sequence
  Description of Artificial Sequence: Synthetic oligonucleotide
  Target: LAMA2; (+) strand; PAM type: YTN; PAM sequence: TTT
cacaaacattgttttatctg

SEQ ID NO: 405795 - DNA, 20 bp, Artificial Sequence
  Description of Artificial Sequence: Synthetic oligonucleotide
  Target: LAMA2; (+) strand; PAM type: YTN; PAM sequence: TTC
acaaacattgttttatctga

SEQ ID NO: 405796 - DNA, 20 bp, Artificial Sequence
  Description of Artificial Sequence: Synthetic oligonucleotide
  Target: LAMA2; (+) strand; PAM type: YTN; PAM sequence: TTG
ttttatctgatcacataagc

SEQ ID NO: 405797 - DNA, 20 bp, Artificial Sequence
  Description of Artificial Sequence: Synthetic oligonucleotide
  Target: LAMA2; (+) strand; PAM type: YTN; PAM sequence: TTT
tatctgatcacataagcagg

SEQ ID NO: 405798 - DNA, 20 bp, Artificial Sequence
  Description of Artificial Sequence: Synthetic oligonucleotide
  Target: LAMA2; (+) strand; PAM type: YTN; PAM sequence: TTT
atctgatcacataagcaggt

SEQ ID NO: 405799 - DNA, 20 bp, Artificial Sequence
  Description of Artificial Sequence: Synthetic oligonucleotide
  Target: LAMA2; (+) strand; PAM type: YTN; PAM sequence: TTA
tctgatcacataagcaggta

SEQ ID NO: 405800 - DNA, 20 bp, Artificial Sequence
  Description of Artificial Sequence: Synthetic oligonucleotide
  Target: LAMA2; (+) strand; PAM type: YTN; PAM sequence: CTG
atcacataagcaggtatttt

SEQ ID NO: 405801 - DNA, 20 bp, Artificial Sequence
  Description of Artificial Sequence: Synthetic oligonucleotide
  Target: LAMA2; (+) strand; PAM type: YTN; PAM sequence: TTT
tgttccagtgttagagaaag

SEQ ID NO: 405802 - DNA, 20 bp, Artificial Sequence
  Description of Artificial Sequence: Synthetic oligonucleotide
  Target: LAMA2; (+) strand; PAM type: YTN; PAM sequence: TTT
gttccagtgttagagaaagt

SEQ ID NO: 405803 - DNA, 20 bp, Artificial Sequence
  Description of Artificial Sequence: Synthetic oligonucleotide
  Target: LAMA2; (+) strand; PAM type: YTN; PAM sequence: TTG
ttccagtgttagagaaagta

SEQ ID NO: 405804 - DNA, 20 bp, Artificial Sequence
  Description of Artificial Sequence: Synthetic oligonucleotide
  Target: LAMA2; (+) strand; PAM type: YTN; PAM sequence: TTC
cagtgttagagaaagtaaaa

SEQ ID NO: 405805 - DNA, 20 bp, Artificial Sequence
  Description of Artificial Sequence: Synthetic oligonucleotide
  Target: LAMA2; (+) strand; PAM type: YTN; PAM sequence: TTA
gagaaagtaaaatatacact

SEQ ID NO: 405806 - DNA, 20 bp, Artificial Sequence
  Description of Artificial Sequence: Synthetic oligonucleotide
  Target: LAMA2; (+) strand; PAM type: YTN; PAM sequence: CTC
aaacttttatgtggtcacag

SEQ ID NO: 405807 - DNA, 20 bp, Artificial Sequence
  Description of Artificial Sequence: Synthetic oligonucleotide
  Target: LAMA2; (+) strand; PAM type: YTN; PAM sequence: CTT
ttatgtggtcacagacatat

SEQ ID NO: 405808 - DNA, 20 bp, Artificial Sequence
  Description of Artificial Sequence: Synthetic oligonucleotide
  Target: LAMA2; (+) strand; PAM type: YTN; PAM sequence: TTT
tatgtggtcacagacatata

SEQ ID NO: 405809 - DNA, 20 bp, Artificial Sequence
  Description of Artificial Sequence: Synthetic oligonucleotide
  Target: LAMA2; (+) strand; PAM type: YTN; PAM sequence: TTT
atgtggtcacagacatatat

SEQ ID NO: 405810 - DNA, 20 bp, Artificial Sequence
  Description of Artificial Sequence: Synthetic oligonucleotide
  Target: LAMA2; (+) strand; PAM type: YTN; PAM sequence: TTA
tgtggtcacagacatatata

SEQ ID NO: 405811 - DNA, 20 bp, Artificial Sequence
  Description of Artificial Sequence: Synthetic oligonucleotide
  Target: LAMA2; (+) strand; PAM type: YTN; PAM sequence: CTC
acaaccaagacagaaatcca

SEQ ID NO: 405812 - DNA, 20 bp, Artificial Sequence
  Description of Artificial Sequence: Synthetic oligonucleotide
  Target: LAMA2; (+) strand; PAM type: YTN; PAM sequence: CTA
ttaattctgagtgtagtgct

SEQ ID NO: 405813 - DNA, 20 bp, Artificial Sequence
  Description of Artificial Sequence: Synthetic oligonucleotide
  Target: LAMA2; (+) strand; PAM type: YTN; PAM sequence: TTA
attctgagtgtagtgctatt

SEQ ID NO: 405814 - DNA, 20 bp, Artificial Sequence
  Description of Artificial Sequence: Synthetic oligonucleotide
  Target: LAMA2; (+) strand; PAM type: YTN; PAM sequence: TTC
tgagtgtagtgctattgctt

SEQ ID NO: 405815 - DNA, 20 bp, Artificial Sequence
  Description of Artificial Sequence: Synthetic oligonucleotide
  Target: LAMA2; (+) strand; PAM type: YTN; PAM sequence: CTG
agtgtagtgctattgctttt

SEQ ID NO: 405816 - DNA, 20 bp, Artificial Sequence
  Description of Artificial Sequence: Synthetic oligonucleotide
  Target: LAMA2; (+) strand; PAM type: YTN; PAM sequence: CTA
ttgctttttaagtatataat

SEQ ID NO: 405817 - DNA, 20 bp, Artificial Sequence
  Description of Artificial Sequence: Synthetic oligonucleotide
  Target: LAMA2; (+) strand; PAM type: YTN; PAM sequence: TTG
ctttttaagtatataattgc

SEQ ID NO: 405818 - DNA, 20 bp, Artificial Sequence
  Description of Artificial Sequence: Synthetic oligonucleotide
  Target: LAMA2; (+) strand; PAM type: YTN; PAM sequence: CTT
tttaagtatataattgctct

SEQ ID NO: 405819 - DNA, 20 bp, Artificial Sequence
  Description of Artificial Sequence: Synthetic oligonucleotide
  Target: LAMA2; (+) strand; PAM type: YTN; PAM sequence: TTT
ttaagtatataattgctcta

SEQ ID NO: 405820 - DNA, 20 bp, Artificial Sequence
  Description of Artificial Sequence: Synthetic oligonucleotide
  Target: LAMA2; (+) strand; PAM type: YTN; PAM sequence: TTT
taagtatataattgctctaa

SEQ ID NO: 405821 - DNA, 20 bp, Artificial Sequence
  Description of Artificial Sequence: Synthetic oligonucleotide
  Target: LAMA2; (+) strand; PAM type: YTN; PAM sequence: TTT
aagtatataattgctctaat

SEQ ID NO: 405822 - DNA, 20 bp, Artificial Sequence
  Description of Artificial Sequence: Synthetic oligonucleotide
  Target: LAMA2; (+) strand; PAM type: YTN; PAM sequence: TTA
agtatataattgctctaatt

SEQ ID NO: 405823 - DNA, 20 bp, Artificial Sequence
  Description of Artificial Sequence: Synthetic oligonucleotide
  Target: LAMA2; (+) strand; PAM type: YTN; PAM sequence: TTG
ctctaattctgtgtagtatg

SEQ ID NO: 405824 - DNA, 20 bp, Artificial Sequence
  Description of Artificial Sequence: Synthetic oligonucleotide
  Target: LAMA2; (+) strand; PAM type: YTN; PAM sequence: CTC
taattctgtgtagtatggca

SEQ ID NO: 405825 - DNA, 20 bp, Artificial Sequence
  Description of Artificial Sequence: Synthetic oligonucleotide
  Target: LAMA2; (+) strand; PAM type: YTN; PAM sequence: CTA
attctgtgtagtatggcatt

SEQ ID NO: 405826 - DNA, 20 bp, Artificial Sequence
  Description of Artificial Sequence: Synthetic oligonucleotide
  Target: LAMA2; (+) strand; PAM type: YTN; PAM sequence: TTC
tgtgtagtatggcattacca

SEQ ID NO: 405827 - DNA, 20 bp, Artificial Sequence
  Description of Artificial Sequence: Synthetic oligonucleotide
  Target: LAMA2; (+) strand; PAM type: YTN; PAM sequence: CTG
tgtagtatggcattaccaat

SEQ ID NO: 405828 - DNA, 20 bp, Artificial Sequence
  Description of Artificial Sequence: Synthetic oligonucleotide
  Target: LAMA2; (+) strand; PAM type: YTN; PAM sequence: TTA
ccaatatctgcaaatgagac

SEQ ID NO: 405829 - DNA, 20 bp, Artificial Sequence
  Description of Artificial Sequence: Synthetic oligonucleotide
  Target: LAMA2; (+) strand; PAM type: YTN; PAM sequence: CTG
caaatgagactttgttactt

SEQ ID NO: 405830 - DNA, 20 bp, Artificial Sequence
  Description of Artificial Sequence: Synthetic oligonucleotide
  Target: LAMA2; (+) strand; PAM type: YTN; PAM sequence: CTT
tgttacttctgctaatataa

SEQ ID NO: 405831 - DNA, 20 bp, Artificial Sequence
  Description of Artificial Sequence: Synthetic oligonucleotide
  Target: LAMA2; (+) strand; PAM type: YTN; PAM sequence: TTT
gttacttctgctaatataaa

SEQ ID NO: 405832 - DNA, 20 bp, Artificial Sequence
  Description of Artificial Sequence: Synthetic oligonucleotide
  Target: LAMA2; (+) strand; PAM type: YTN; PAM sequence: TTG
ttacttctgctaatataaat

SEQ ID NO: 405833 - DNA, 20 bp, Artificial Sequence
  Description of Artificial Sequence: Synthetic oligonucleotide
  Target: LAMA2; (+) strand; PAM type: YTN; PAM sequence: TTA
cttctgctaatataaataga

SEQ ID NO: 405834 - DNA, 20 bp, Artificial Sequence
  Description of Artificial Sequence: Synthetic oligonucleotide
  Target: LAMA2; (+) strand; PAM type: YTN; PAM sequence: CTT
ctgctaatataaatagactc

SEQ ID NO: 405835 - DNA, 20 bp, Artificial Sequence
  Description of Artificial Sequence: Synthetic oligonucleotide
  Target: LAMA2; (+) strand; PAM type: YTN; PAM sequence: TTC
tgctaatataaatagactca

SEQ ID NO: 405836 - DNA, 20 bp, Artificial Sequence
  Description of Artificial Sequence: Synthetic oligonucleotide
  Target: LAMA2; (+) strand; PAM type: YTN; PAM sequence: CTG
ctaatataaatagactcaat

SEQ ID NO: 405837 - DNA, 20 bp, Artificial Sequence
  Description of Artificial Sequence: Synthetic oligonucleotide
  Target: LAMA2; (+) strand; PAM type: YTN; PAM sequence: CTA
atataaatagactcaattaa

SEQ ID NO: 405838 - DNA, 20 bp, Artificial Sequence
  Description of Artificial Sequence: Synthetic oligonucleotide
  Target: LAMA2; (+) strand; PAM type: YTN; PAM sequence: CTC
aattaatgttgccaatgcca

SEQ ID NO: 405839 - DNA, 20 bp, Artificial Sequence
  Description of Artificial Sequence: Synthetic oligonucleotide
  Target: LAMA2; (+) strand; PAM type: YTN; PAM sequence: TTA
atgttgccaatgccagtgtg

SEQ ID NO: 405840 - DNA, 20 bp, Artificial Sequence
  Description of Artificial Sequence: Synthetic oligonucleotide
  Target: LAMA2; (+) strand; PAM type: YTN; PAM sequence: TTG
ccaatgccagtgtgacattt

SEQ ID NO: 405841 - DNA, 20 bp, Artificial Sequence
  Description of Artificial Sequence: Synthetic oligonucleotide
  Target: LAMA2; (+) strand; PAM type: YTN; PAM sequence: TTT
catgaaaatttacgtttaaa

SEQ ID NO: 405842 - DNA, 20 bp, Artificial Sequence
  Description of Artificial Sequence: Synthetic oligonucleotide
  Target: LAMA2; (+) strand; PAM type: YTN; PAM sequence: TTC
atgaaaatttacgtttaaat

SEQ ID NO: 405843 - DNA, 20 bp, Artificial Sequence
  Description of Artificial Sequence: Synthetic oligonucleotide
  Target: LAMA2; (+) strand; PAM type: YTN; PAM sequence: TTT
acgtttaaatttaaatttgt

SEQ ID NO: 405844 - DNA, 20 bp, Artificial Sequence
  Description of Artificial Sequence: Synthetic oligonucleotide
  Target: LAMA2; (+) strand; PAM type: YTN; PAM sequence: TTA
cgtttaaatttaaatttgta

SEQ ID NO: 405845 - DNA, 20 bp, Artificial Sequence
  Description of Artificial Sequence: Synthetic oligonucleotide
  Target: LAMA2; (+) strand; PAM type: YTN; PAM sequence: TTT
aaatttaaatttgtaccgtc

SEQ ID NO: 405846 - DNA, 20 bp, Artificial Sequence
  Description of Artificial Sequence: Synthetic oligonucleotide
  Target: LAMA2; (+) strand; PAM type: YTN; PAM sequence: TTA
aatttaaatttgtaccgtct

SEQ ID NO: 405847 - DNA, 20 bp, Artificial Sequence
  Description of Artificial Sequence: Synthetic oligonucleotide
  Target: LAMA2; (+) strand; PAM type: YTN; PAM sequence: TTT
aaatttgtaccgtctttcat

SEQ ID NO: 405848 - DNA, 20 bp, Artificial Sequence
  Description of Artificial Sequence: Synthetic oligonucleotide
  Target: LAMA2; (+) strand; PAM type: YTN; PAM sequence: TTA
aatttgtaccgtctttcatt

SEQ ID NO: 405849 - DNA, 20 bp, Artificial Sequence
  Description of Artificial Sequence: Synthetic oligonucleotide
  Target: LAMA2; (+) strand; PAM type: YTN; PAM sequence: TTT
gtaccgtctttcatttctgc

SEQ ID NO: 405850 - DNA, 20 bp, Artificial Sequence
  Description of Artificial Sequence: Synthetic oligonucleotide
  Target: LAMA2; (+) strand; PAM type: YTN; PAM sequence: TTG
taccgtctttcatttctgca

SEQ ID NO: 405851 - DNA, 20 bp, Artificial Sequence
  Description of Artificial Sequence: Synthetic oligonucleotide
  Target: LAMA2; (+) strand; PAM type: YTN; PAM sequence: CTT
tcatttctgcatttaataca

SEQ ID NO: 405852 - DNA, 20 bp, Artificial Sequence
  Description of Artificial Sequence: Synthetic oligonucleotide
  Target: LAMA2; (+) strand; PAM type: YTN; PAM sequence: TTT
catttctgcatttaatacat

SEQ ID NO: 405853 - DNA, 20 bp, Artificial Sequence
  Description of Artificial Sequence: Synthetic oligonucleotide
  Target: LAMA2; (+) strand; PAM type: YTN; PAM sequence: TTC
atttctgcatttaatacata

SEQ ID NO: 405854 - DNA, 20 bp, Artificial Sequence
  Description of Artificial Sequence: Synthetic oligonucleotide
  Target: LAMA2; (+) strand; PAM type: YTN; PAM sequence: TTT
ctgcatttaatacatatctg

SEQ ID NO: 405855 - DNA, 20 bp, Artificial Sequence
  Description of Artificial Sequence: Synthetic oligonucleotide
  Target: LAMA2; (+) strand; PAM type: YTN; PAM sequence: TTC
tgcatttaatacatatctgc

SEQ ID NO: 405856 - DNA, 20 bp, Artificial Sequence
  Description of Artificial Sequence: Synthetic oligonucleotide
  Target: LAMA2; (+) strand; PAM type: YTN; PAM sequence: CTG
catttaatacatatctgcca

SEQ ID NO: 405857 - DNA, 20 bp, Artificial Sequence
  Description of Artificial Sequence: Synthetic oligonucleotide
  Target: LAMA2; (+) strand; PAM type: YTN; PAM sequence: TTT
aatacatatctgccaggcac

SEQ ID NO: 405858 - DNA, 20 bp, Artificial Sequence
  Description of Artificial Sequence: Synthetic oligonucleotide
  Target: LAMA2; (+) strand; PAM type: YTN; PAM sequence: TTA
atacatatctgccaggcacc

SEQ ID NO: 405859 - DNA, 20 bp, Artificial Sequence
  Description of Artificial Sequence: Synthetic oligonucleotide
  Target: LAMA2; (+) strand; PAM type: YTN; PAM sequence: CTG
ccaggcaccttctaagtacc

SEQ ID NO: 405860 - DNA, 20 bp, Artificial Sequence
  Description of Artificial Sequence: Synthetic oligonucleotide
  Target: LAMA2; (+) strand; PAM type: YTN; PAM sequence: CTT
ctaagtaccatgtaagaact

SEQ ID NO: 405861 - DNA, 20 bp, Artificial Sequence
  Description of Artificial Sequence: Synthetic oligonucleotide
  Target: LAMA2; (+) strand; PAM type: YTN; PAM sequence: TTC
taagtaccatgtaagaacta

SEQ ID NO: 405862 - DNA, 20 bp, Artificial Sequence
  Description of Artificial Sequence: Synthetic oligonucleotide
  Target: LAMA2; (+) strand; PAM type: YTN; PAM sequence: CTA
agtaccatgtaagaactaaa

SEQ ID NO: 405863 - DNA, 20 bp, Artificial Sequence
  Description of Artificial Sequence: Synthetic oligonucleotide
  Target: LAMA2; (+) strand; PAM type: YTN; PAM sequence: CTA
aatgaagttctaagttcttg

SEQ ID NO: 405864 - DNA, 20 bp, Artificial Sequence
  Description of Artificial Sequence: Synthetic oligonucleotide
  Target: LAMA2; (+) strand; PAM type: YTN; PAM sequence: TTC
taagttcttgccttcaagga

SEQ ID NO: 405865 - DNA, 20 bp, Artificial Sequence
  Description of Artificial Sequence: Synthetic oligonucleotide
  Target: LAMA2; (+) strand; PAM type: YTN; PAM sequence: CTA
agttcttgccttcaaggaac

SEQ ID NO: 405866 - DNA, 20 bp, Artificial Sequence
  Description of Artificial Sequence: Synthetic oligonucleotide
  Target: LAMA2; (+) strand; PAM type: YTN; PAM sequence: TTC
ttgccttcaaggaacttgca

SEQ ID NO: 405867 - DNA, 20 bp, Artificial Sequence
  Description of Artificial Sequence: Synthetic oligonucleotide
  Target: LAMA2; (+) strand; PAM type: YTN; PAM sequence: CTT
gccttcaaggaacttgcatc

SEQ ID NO: 405868 - DNA, 20 bp, Artificial Sequence
  Description of Artificial Sequence: Synthetic oligonucleotide
  Target: LAMA2; (+) strand; PAM type: YTN; PAM sequence: TTG
ccttcaaggaacttgcatcg

SEQ ID NO: 405869 - DNA, 20 bp, Artificial Sequence
  Description of Artificial Sequence: Synthetic oligonucleotide
  Target: LAMA2; (+) strand; PAM type: YTN; PAM sequence: CTT
caaggaacttgcatcgaact

SEQ ID NO: 405870 - DNA, 20 bp, Artificial Sequence
  Description of Artificial Sequence: Synthetic oligonucleotide
  Target: LAMA2; (+) strand; PAM type: YTN; PAM sequence: TTC
aaggaacttgcatcgaactg

SEQ ID NO: 405871 - DNA, 20 bp, Artificial Sequence
  Description of Artificial Sequence: Synthetic oligonucleotide
  Target: LAMA2; (+) strand; PAM type: YTN; PAM sequence: CTT
gcatcgaactggggagatag

SEQ ID NO: 405872 - DNA, 20 bp, Artificial Sequence
  Description of Artificial Sequence: Synthetic oligonucleotide
  Target: LAMA2; (+) strand; PAM type: YTN; PAM sequence: TTG
catcgaactggggagataga

SEQ ID NO: 405873 - DNA, 20 bp, Artificial Sequence
  Description of Artificial Sequence: Synthetic oligonucleotide
  Target: LAMA2; (+) strand; PAM type: YTN; PAM sequence: CTG
gggagatagacaagtatcaa

SEQ ID NO: 405874 - DNA, 20 bp, Artificial Sequence
  Description of Artificial Sequence: Synthetic oligonucleotide
  Target: LAMA2; (+) strand; PAM type: YTN; PAM sequence: TTA
gaggatagagagctaattgc

SEQ ID NO: 405875 - DNA, 20 bp, Artificial Sequence
  Description of Artificial Sequence: Synthetic oligonucleotide
  Target: LAMA2; (+) strand; PAM type: YTN; PAM sequence: CTA
attgctgtgatagagatgta

SEQ ID NO: 405876 - DNA, 20 bp, Artificial Sequence
  Description of Artificial Sequence: Synthetic oligonucleotide
  Target: LAMA2; (+) strand; PAM type: YTN; PAM sequence: TTG
ctgtgatagagatgtatgta

SEQ ID NO: 405877 - DNA, 20 bp, Artificial Sequence
  Description of Artificial Sequence: Synthetic oligonucleotide
  Target: LAMA2; (+) strand; PAM type: YTN; PAM sequence: CTG
tgatagagatgtatgtagcc

SEQ ID NO: 405878 - DNA, 20 bp, Artificial Sequence
  Description of Artificial Sequence: Synthetic oligonucleotide
  Target: LAMA2; (+) strand; PAM type: YTN; PAM sequence: CTC
agaagagagacacttgagtc

SEQ ID NO: 405879 - DNA, 20 bp, Artificial Sequence
  Description of Artificial Sequence: Synthetic oligonucleotide
  Target: LAMA2; (+) strand; PAM type: YTN; PAM sequence: CTT
gagtcaaacagagaggtcag

SEQ ID NO: 405880 - DNA, 20 bp, Artificial Sequence
  Description of Artificial Sequence: Synthetic oligonucleotide
  Target: LAMA2; (+) strand; PAM type: YTN; PAM sequence: TTG
agtcaaacagagaggtcagt

SEQ ID NO: 405881 - DNA, 20 bp, Artificial Sequence
  Description of Artificial Sequence: Synthetic oligonucleotide
  Target: LAMA2; (+) strand; PAM type: YTN; PAM sequence: TTT
ccactggagtgaccctgagg

SEQ ID NO: 405882 - DNA, 20 bp, Artificial Sequence
  Description of Artificial Sequence: Synthetic oligonucleotide
  Target: LAMA2; (+) strand; PAM type: YTN; PAM sequence: TTC
cactggagtgaccctgaggc

SEQ ID NO: 405883 - DNA, 20 bp, Artificial Sequence
  Description of Artificial Sequence: Synthetic oligonucleotide
  Target: LAMA2; (+) strand; PAM type: YTN; PAM sequence: CTG
gagtgaccctgaggcacaag

SEQ ID NO: 405884 - DNA, 20 bp, Artificial Sequence
  Description of Artificial Sequence: Synthetic oligonucleotide
  Target: LAMA2; (+) strand; PAM type: YTN; PAM sequence: CTG
aggcacaagctggatgagga

SEQ ID NO: 405885 - DNA, 20 bp, Artificial Sequence
  Description of Artificial Sequence: Synthetic oligonucleotide
  Target: LAMA2; (+) strand; PAM type: YTN; PAM sequence: CTG
gatgaggagttagctggatg

SEQ ID NO: 405886 - DNA, 20 bp, Artificial Sequence
  Description of Artificial Sequence: Synthetic oligonucleotide
  Target: LAMA2; (+) strand; PAM type: YTN; PAM sequence: TTA
gctggatgaaaagcatgtat

SEQ ID NO: 405887 - DNA, 20 bp, Artificial Sequence
  Description of Artificial Sequence: Synthetic oligonucleotide
  Target: LAMA2; (+) strand; PAM type: YTN; PAM sequence: CTG
gatgaaaagcatgtatggac

SEQ ID NO: 405888 - DNA, 20 bp, Artificial Sequence
  Description of Artificial Sequence: Synthetic oligonucleotide
  Target: LAMA2; (+) strand; PAM type: YTN; PAM sequence: TTT
cagagtagtgaaagttgtgt

SEQ ID NO: 405889 - DNA, 20 bp, Artificial Sequence
  Description of Artificial Sequence: Synthetic oligonucleotide
  Target: LAMA2; (+) strand; PAM type: YTN; PAM sequence: TTC
agagtagtgaaagttgtgtg

SEQ ID NO: 405890 - DNA, 20 bp, Artificial Sequence
  Description of Artificial Sequence: Synthetic oligonucleotide
  Target: LAMA2; (+) strand; PAM type: YTN; PAM sequence: TTG
tgtgaaagcctggagtcatc

SEQ ID NO: 405891 - DNA, 20 bp, Artificial Sequence
  Description of Artificial Sequence: Synthetic oligonucleotide
  Target: LAMA2; (+) strand; PAM type: YTN; PAM sequence: CTG
gagtcatcagagagaataac

SEQ ID NO: 405892 - DNA, 20 bp, Artificial Sequence
  Description of Artificial Sequence: Synthetic oligonucleotide
  Target: LAMA2; (+) strand; PAM type: YTN; PAM sequence: CTT
ttccagctgcatttccaaca

SEQ ID NO: 405893 - DNA, 20 bp, Artificial Sequence
  Description of Artificial Sequence: Synthetic oligonucleotide
  Target: LAMA2; (+) strand; PAM type: YTN; PAM sequence: TTT
tccagctgcatttccaacag

SEQ ID NO: 405894 - DNA, 20 bp, Artificial Sequence
  Description of Artificial Sequence: Synthetic oligonucleotide
  Target: LAMA2; (+) strand; PAM type: YTN; PAM sequence: TTT
ccagctgcatttccaacagg

SEQ ID NO: 405895 - DNA, 20 bp, Artificial Sequence
  Description of Artificial Sequence: Synthetic oligonucleotide
  Target: LAMA2; (+) strand; PAM type: YTN; PAM sequence: TTC
cagctgcatttccaacagga

SEQ ID NO: 405896 - DNA, 20 bp, Artificial Sequence
  Description of Artificial Sequence: Synthetic oligonucleotide
  Target: LAMA2; (+) strand; PAM type: YTN; PAM sequence: CTG
catttccaacaggaaactct

SEQ ID NO: 405897 - DNA, 20 bp, Artificial Sequence
  Description of Artificial Sequence: Synthetic oligonucleotide
  Target: LAMA2; (+) strand; PAM type: YTN; PAM sequence: TTT
ccaacaggaaactctagaga

SEQ ID NO: 405898 - DNA, 20 bp, Artificial Sequence
  Description of Artificial Sequence: Synthetic oligonucleotide
  Target: LAMA2; (+) strand; PAM type: YTN; PAM sequence: TTC
caacaggaaactctagagaa

SEQ ID NO: 405899 - DNA, 20 bp, Artificial Sequence
  Description of Artificial Sequence: Synthetic oligonucleotide
  Target: LAMA2; (+) strand; PAM type: YTN; PAM sequence: CTC
tagagaaacctctcatatgg

SEQ ID NO: 405900 - DNA, 20 bp, Artificial Sequence
  Description of Artificial Sequence: Synthetic oligonucleotide
  Target: LAMA2; (+) strand; PAM type: YTN; PAM sequence: CTA
gagaaacctctcatatggga

SEQ ID NO: 405901 - DNA, 20 bp, Artificial Sequence
  Description of Artificial Sequence: Synthetic oligonucleotide
  Target: LAMA2; (+) strand; PAM type: YTN; PAM sequence: CTC
tcatatgggacaaaaactgg

SEQ ID NO: 405902 - DNA, 20 bp, Artificial Sequence
  Description of Artificial Sequence: Synthetic oligonucleotide
  Target: LAMA2; (+) strand; PAM type: YTN; PAM sequence: CTC
atatgggacaaaaactggct

SEQ ID NO: 405903 - DNA, 20 bp, Artificial Sequence
  Description of Artificial Sequence: Synthetic oligonucleotide
  Target: LAMA2; (+) strand; PAM type: YTN; PAM sequence: CTG
gctttgcaattctttatttt

SEQ ID NO: 405904 - DNA, 20 bp, Artificial Sequence
  Description of Artificial Sequence: Synthetic oligonucleotide
  Target: LAMA2; (+) strand; PAM type: YTN; PAM sequence: CTT
tgcaattctttattttggag

SEQ ID NO: 405905 - DNA, 20 bp, Artificial Sequence
  Description of Artificial Sequence: Synthetic oligonucleotide
  Target: LAMA2; (+) strand; PAM type: YTN; PAM sequence: TTT
gcaattctttattttggagt

SEQ ID NO: 405906 - DNA, 20 bp, Artificial Sequence
  Description of Artificial Sequence: Synthetic oligonucleotide
  Target: LAMA2; (+) strand; PAM type: YTN; PAM sequence: TTG
caattctttattttggagtg

SEQ ID NO: 405907 - DNA, 20 bp, Artificial Sequence
  Description of Artificial Sequence: Synthetic oligonucleotide
  Target: LAMA2; (+) strand; PAM type: YTN; PAM sequence: TTC
tttattttggagtgctgctg

SEQ ID NO: 405908 - DNA, 20 bp, Artificial Sequence
  Description of Artificial Sequence: Synthetic oligonucleotide
  Target: LAMA2; (+) strand; PAM type: YTN; PAM sequence: CTT
tattttggagtgctgctgca

SEQ ID NO: 405909 - DNA, 20 bp, Artificial Sequence
  Description of Artificial Sequence: Synthetic oligonucleotide
  Target: LAMA2; (+) strand; PAM type: YTN; PAM sequence: TTT
attttggagtgctgctgcat

SEQ ID NO: 405910 - DNA, 20 bp, Artificial Sequence
  Description of Artificial Sequence: Synthetic oligonucleotide
  Target: LAMA2; (+) strand; PAM type: YTN; PAM sequence: TTA
ttttggagtgctgctgcata

SEQ ID NO: 405911 - DNA, 20 bp, Artificial Sequence
  Description of Artificial Sequence: Synthetic oligonucleotide
  Target: LAMA2; (+) strand; PAM type: YTN; PAM sequence: TTT
tggagtgctgctgcatacat

SEQ ID NO: 405912 - DNA, 20 bp, Artificial Sequence
  Description of Artificial Sequence: Synthetic oligonucleotide
  Target: LAMA2; (+) strand; PAM type: YTN; PAM sequence: TTT
ggagtgctgctgcatacatt

SEQ ID NO: 405913 - DNA, 20 bp, Artificial Sequence
  Description of Artificial Sequence: Synthetic oligonucleotide
  Target: LAMA2; (+) strand; PAM type: YTN; PAM sequence: TTG
gagtgctgctgcatacattg

SEQ ID NO: 405914 - DNA, 20 bp, Artificial Sequence
  Description of Artificial Sequence: Synthetic oligonucleotide
  Target: LAMA2; (+) strand; PAM type: YTN; PAM sequence: CTG
ctgcatacattgttcctgtg

SEQ ID NO: 405915 - DNA, 20 bp, Artificial Sequence
  Description of Artificial Sequence: Synthetic oligonucleotide
  Target: LAMA2; (+) strand; PAM type: YTN; PAM sequence: CTG
catacattgttcctgtgtaa

SEQ ID NO: 405916 - DNA, 20 bp, Artificial Sequence
  Description of Artificial Sequence: Synthetic oligonucleotide
  Target: LAMA2; (+) strand; PAM type: YTN; PAM sequence: TTG
ttcctgtgtaagagaggcac

SEQ ID NO: 405917 - DNA, 20 bp, Artificial Sequence
  Description of Artificial Sequence: Synthetic oligonucleotide
  Target: LAMA2; (+) strand; PAM type: YTN; PAM sequence: TTC
ctgtgtaagagaggcacaat

SEQ ID NO: 405918 - DNA, 20 bp, Artificial Sequence
  Description of Artificial Sequence: Synthetic oligonucleotide
  Target: LAMA2; (+) strand; PAM type: YTN; PAM sequence: CTG
tgtaagagaggcacaatgca

SEQ ID NO: 405919 - DNA, 20 bp, Artificial Sequence
  Description of Artificial Sequence: Synthetic oligonucleotide
  Target: LAMA2; (+) strand; PAM type: YTN; PAM sequence: TTT
gcatgtcagaagctctgtgt

SEQ ID NO: 405920 - DNA, 20 bp, Artificial Sequence
  Description of Artificial Sequence: Synthetic oligonucleotide
  Target: LAMA2; (+) strand; PAM type: YTN; PAM sequence: TTG
catgtcagaagctctgtgta

SEQ ID NO: 405921 - DNA, 20 bp, Artificial Sequence
  Description of Artificial Sequence: Synthetic oligonucleotide
  Target: LAMA2; (+) strand; PAM type: YTN; PAM sequence: CTC
tgtgtagttagttgttcagt

SEQ ID NO: 405922 - DNA, 20 bp, Artificial Sequence
  Description of Artificial Sequence: Synthetic oligonucleotide
  Target: LAMA2; (+) strand; PAM type: YTN; PAM sequence: CTG
tgtagttagttgttcagtaa

SEQ ID NO: 405923 - DNA, 20 bp, Artificial Sequence
  Description of Artificial Sequence: Synthetic oligonucleotide
  Target: LAMA2; (+) strand; PAM type: YTN; PAM sequence: TTA
gttgttcagtaagaagaatg

SEQ ID NO: 405924 - DNA, 20 bp, Artificial Sequence
  Description of Artificial Sequence: Synthetic oligonucleotide
  Target: LAMA2; (+) strand; PAM type: YTN; PAM sequence: TTG
ttcagtaagaagaatgttta

SEQ ID NO: 405925 - DNA, 20 bp, Artificial Sequence
  Description of Artificial Sequence: Synthetic oligonucleotide
  Target: LAMA2; (+) strand; PAM type: YTN; PAM sequence: TTC
agtaagaagaatgtttagct

SEQ ID NO: 405926 - DNA, 20 bp, Artificial Sequence
  Description of Artificial Sequence: Synthetic oligonucleotide
  Target: LAMA2; (+) strand; PAM type: YTN; PAM sequence: TTT
agctgtttaacccagcattt

SEQ ID NO: 405927 - DNA, 20 bp, Artificial Sequence
  Description of Artificial Sequence: Synthetic oligonucleotide
  Target: LAMA2; (+) strand; PAM type: YTN; PAM sequence: TTA
gctgtttaacccagcatttc

SEQ ID NO: 405928 - DNA, 20 bp, Artificial Sequence
  Description of Artificial Sequence: Synthetic oligonucleotide
  Target: LAMA2; (+) strand; PAM type: YTN; PAM sequence: CTG
tttaacccagcatttcccaa

SEQ ID NO: 405929 - DNA, 20 bp, Artificial Sequence
  Description of Artificial Sequence: Synthetic oligonucleotide
  Target: LAMA2; (+) strand; PAM type: YTN; PAM sequence: TTT
aacccagcatttcccaaatt

SEQ ID NO: 405930 - DNA, 20 bp, Artificial Sequence
  Description of Artificial Sequence: Synthetic oligonucleotide
  Target: LAMA2; (+) strand; PAM type: YTN; PAM sequence: TTA
acccagcatttcccaaattt

SEQ ID NO: 405931 - DNA, 20 bp, Artificial Sequence
  Description of Artificial Sequence: Synthetic oligonucleotide
  Target: LAMA2; (+) strand; PAM type: YTN; PAM sequence: TTT
cccaaatttctttaatcaga

SEQ ID NO: 405932 - DNA, 20 bp, Artificial Sequence
  Description of Artificial Sequence: Synthetic oligonucleotide
  Target: LAMA2; (+) strand; PAM type: YTN; PAM sequence: TTC
ccaaatttctttaatcagag

SEQ ID NO: 405933 - DNA, 20 bp, Artificial Sequence
  Description of Artificial Sequence: Synthetic oligonucleotide
  Target: LAMA2; (+) strand; PAM type: YTN; PAM sequence: TTT
ctttaatcagagaaatcctt

SEQ ID NO: 405934 - DNA, 20 bp, Artificial Sequence
  Description of Artificial Sequence: Synthetic oligonucleotide
  Target: LAMA2; (+) strand; PAM type: YTN; PAM sequence: TTC
tttaatcagagaaatccttc

SEQ ID NO: 405935 - DNA, 20 bp, Artificial Sequence
  Description of Artificial Sequence: Synthetic oligonucleotide
  Target: LAMA2; (+) strand; PAM type: YTN; PAM sequence: CTT
taatcagagaaatccttcca

SEQ ID NO: 405936 - DNA, 20 bp, Artificial Sequence
  Description of Artificial Sequence: Synthetic oligonucleotide
  Target: LAMA2; (+) strand; PAM type: YTN; PAM sequence: TTT
aatcagagaaatccttccat

SEQ ID NO: 405937 - DNA, 20 bp, Artificial Sequence
  Description of Artificial Sequence: Synthetic oligonucleotide
  Target: LAMA2; (+) strand; PAM type: YTN; PAM sequence: TTA
atcagagaaatccttccatt

SEQ ID NO: 405938 - DNA, 20 bp, Artificial Sequence
  Description of Artificial Sequence: Synthetic oligonucleotide
  Target: LAMA2; (+) strand; PAM type: YTN; PAM sequence: CTT
ccattcctgtaatactagca

SEQ ID NO: 405939 - DNA, 20 bp, Artificial Sequence
  Description of Artificial Sequence: Synthetic oligonucleotide
  Target: LAMA2; (+) strand; PAM type: YTN; PAM sequence: TTC
cattcctgtaatactagcat

SEQ ID NO: 405940 - DNA, 20 bp, Artificial Sequence
  Description of Artificial Sequence: Synthetic oligonucleotide
  Target: LAMA2; (+) strand; PAM type: YTN; PAM sequence: TTC
ctgtaatactagcattctgc

SEQ ID NO: 405941 - DNA, 20 bp, Artificial Sequence
  Description of Artificial Sequence: Synthetic oligonucleotide
  Target: LAMA2; (+) strand; PAM type: YTN; PAM sequence: CTG
taatactagcattctgctga

SEQ ID NO: 405942 - DNA, 20 bp, Artificial Sequence
  Description of Artificial Sequence: Synthetic oligonucleotide
  Target: LAMA2; (+) strand; PAM type: YTN; PAM sequence: CTA
gcattctgctgaacacactt

SEQ ID NO: 405943 - DNA, 20 bp, Artificial Sequence
  Description of Artificial Sequence: Synthetic oligonucleotide
  Target: LAMA2; (+) strand; PAM type: YTN; PAM sequence: TTC
tgctgaacacactttgggga

SEQ ID NO: 405944 - DNA, 20 bp, Artificial Sequence
  Description of Artificial Sequence: Synthetic oligonucleotide
  Target: LAMA2; (+) strand; PAM type: YTN; PAM sequence: CTG
ctgaacacactttggggaat

SEQ ID NO: 405945 - DNA, 20 bp, Artificial Sequence
  Description of Artificial Sequence: Synthetic oligonucleotide
  Target: LAMA2; (+) strand; PAM type: YTN; PAM sequence: CTG
aacacactttggggaatgct

SEQ ID NO: 405946 - DNA, 20 bp, Artificial Sequence
  Description of Artificial Sequence: Synthetic oligonucleotide
  Target: LAMA2; (+) strand; PAM type: YTN; PAM sequence: CTT
tggggaatgctttagtaact

SEQ ID NO: 405947 - DNA, 20 bp, Artificial Sequence
  Description of Artificial Sequence: Synthetic oligonucleotide
  Target: LAMA2; (+) strand; PAM type: YTN; PAM sequence: TTT
ggggaatgctttagtaacta

SEQ ID NO: 405948 - DNA, 20 bp, Artificial Sequence
  Description of Artificial Sequence: Synthetic oligonucleotide
  Target: LAMA2; (+) strand; PAM type: YTN; PAM sequence: TTG
gggaatgctttagtaactac

SEQ ID NO: 405949 - DNA, 20 bp, Artificial Sequence
  Description of Artificial Sequence: Synthetic oligonucleotide
  Target: LAMA2; (+) strand; PAM type: YTN; PAM sequence: CTT
tagtaactacaagtgaatcc

SEQ ID NO: 405950 - DNA, 20 bp, Artificial Sequence
  Description of Artificial Sequence: Synthetic oligonucleotide
  Target: LAMA2; (+) strand; PAM type: YTN; PAM sequence: TTT
agtaactacaagtgaatcca

SEQ ID NO: 405951 - DNA, 20 bp, Artificial Sequence
  Description of Artificial Sequence: Synthetic oligonucleotide
  Target: LAMA2; (+) strand; PAM type: YTN; PAM sequence: TTA
gtaactacaagtgaatccat

SEQ ID NO: 405952 - DNA, 20 bp, Artificial Sequence
  Description of Artificial Sequence: Synthetic oligonucleotide
  Target: LAMA2; (+) strand; PAM type: YTN; PAM sequence: CTA
caagtgaatccatagcctac

SEQ ID NO: 405953 - DNA, 20 bp, Artificial Sequence
  Description of Artificial Sequence: Synthetic oligonucleotide
  Target: LAMA2; (+) strand; PAM type: YTN; PAM sequence: CTA
cacgaatgaatgttggcagg

SEQ ID NO: 405954 - DNA, 20 bp, Artificial Sequence
  Description of Artificial Sequence: Synthetic oligonucleotide
  Target: LAMA2; (+) strand; PAM type: YTN; PAM sequence: TTG
gcaggaaattatcagtaggg

SEQ ID NO: 405955 - DNA, 20 bp, Artificial Sequence
  Description of Artificial Sequence: Synthetic oligonucleotide
  Target: LAMA2; (+) strand; PAM type: YTN; PAM sequence: TTA
tcagtaggggccaagagata

SEQ ID NO: 405956 - DNA, 20 bp, Artificial Sequence
  Description of Artificial Sequence: Synthetic oligonucleotide
  Target: LAMA2; (+) strand; PAM type: YTN; PAM sequence: CTA
agtgagtgagtttcagcttt

SEQ ID NO: 405957 - DNA, 20 bp, Artificial Sequence
  Description of Artificial Sequence: Synthetic oligonucleotide
  Target: LAMA2; (+) strand; PAM type: YTN; PAM sequence: TTT
cagctttatcctgaaagcca

SEQ ID NO: 405958 - DNA, 20 bp, Artificial Sequence
  Description of Artificial Sequence: Synthetic oligonucleotide
  Target: LAMA2; (+) strand; PAM type: YTN; PAM sequence: TTC
agctttatcctgaaagccat

SEQ ID NO: 405959 - DNA, 20 bp, Artificial Sequence
  Description of Artificial Sequence: Synthetic oligonucleotide
  Target: LAMA2; (+) strand; PAM type: YTN; PAM sequence: CTT
tatcctgaaagccataggga

SEQ ID NO: 405960 - DNA, 20 bp, Artificial Sequence
  Description of Artificial Sequence: Synthetic oligonucleotide
  Target: LAMA2; (+) strand; PAM type: YTN; PAM sequence: TTT
atcctgaaagccatagggat

SEQ ID NO: 405961 - DNA, 20 bp, Artificial Sequence
  Description of Artificial Sequence: Synthetic oligonucleotide
  Target: LAMA2; (+) strand; PAM type: YTN; PAM sequence: TTA
tcctgaaagccatagggata

SEQ ID NO: 405962 - DNA, 20 bp, Artificial Sequence
  Description of Artificial Sequence: Synthetic oligonucleotide
  Target: LAMA2; (+) strand; PAM type: YTN; PAM sequence: CTG
aaagccatagggataccgag

SEQ ID NO: 405963 - DNA, 20 bp, Artificial Sequence
  Description of Artificial Sequence: Synthetic oligonucleotide
  Target: LAMA2; (+) strand; PAM type: YTN; PAM sequence: CTC
taagagttttaagaaagggt

SEQ ID NO: 405964 - DNA, 20 bp, Artificial Sequence
  Description of Artificial Sequence: Synthetic oligonucleotide
  Target: LAMA2; (+) strand; PAM type: YTN; PAM sequence: CTA
agagttttaagaaagggtgt

SEQ ID NO: 405965 - DNA, 20 bp, Artificial Sequence
  Description of Artificial Sequence: Synthetic oligonucleotide
  Target: LAMA2; (+) strand; PAM type: YTN; PAM sequence: TTT
taagaaagggtgtgatatca

SEQ ID NO: 405966 - DNA, 20 bp, Artificial Sequence
  Description of Artificial Sequence: Synthetic oligonucleotide
  Target: LAMA2; (+) strand; PAM type: YTN; PAM sequence: TTT
aagaaagggtgtgatatcat

SEQ ID NO: 405967 - DNA, 20 bp, Artificial Sequence
  Description of Artificial Sequence: Synthetic oligonucleotide
  Target: LAMA2; (+) strand; PAM type: YTN; PAM sequence: TTA
agaaagggtgtgatatcata

SEQ ID NO: 405968 - DNA, 20 bp, Artificial Sequence
  Description of Artificial Sequence: Synthetic oligonucleotide
  Target: LAMA2; (+) strand; PAM type: YTN; PAM sequence: CTT
gtgctttagtaaagtttctt

SEQ ID NO: 405969 - DNA, 20 bp, Artificial Sequence
  Description of Artificial Sequence: Synthetic oligonucleotide
  Target: LAMA2; (+) strand; PAM type: YTN; PAM sequence: TTG
tgctttagtaaagtttcttt

SEQ ID NO: 405970 - DNA, 20 bp, Artificial Sequence
  Description of Artificial Sequence: Synthetic oligonucleotide
  Target: LAMA2; (+) strand; PAM type: YTN; PAM sequence: CTT
tagtaaagtttctttagcag

SEQ ID NO: 405971 - DNA, 20 bp, Artificial Sequence
  Description of Artificial Sequence: Synthetic oligonucleotide
  Target: LAMA2; (+) strand; PAM type: YTN; PAM sequence: TTT
agtaaagtttctttagcagc

SEQ ID NO: 405972 - DNA, 20 bp, Artificial Sequence
  Description of Artificial Sequence: Synthetic oligonucleotide
  Target: LAMA2; (+) strand; PAM type: YTN; PAM sequence: TTA
gtaaagtttctttagcagca

SEQ ID NO: 405973 - DNA, 20 bp, Artificial Sequence
  Description of Artificial Sequence: Synthetic oligonucleotide
  Target: LAMA2; (+) strand; PAM type: YTN; PAM sequence: TTT
ctttagcagcagtttggaga

SEQ ID NO: 405974 - DNA, 20 bp, Artificial Sequence
  Description of Artificial Sequence: Synthetic oligonucleotide
  Target: LAMA2; (+) strand; PAM type: YTN; PAM sequence: TTC
tttagcagcagtttggagat

SEQ ID NO: 405975 - DNA, 20 bp, Artificial Sequence
  Description of Artificial Sequence: Synthetic oligonucleotide
  Target: LAMA2; (+) strand; PAM type: YTN; PAM sequence: CTT
tagcagcagtttggagatat

SEQ ID NO: 405976 - DNA, 20 bp, Artificial Sequence
  Description of Artificial Sequence: Synthetic oligonucleotide
  Target: LAMA2; (+) strand; PAM type: YTN; PAM sequence: TTT
agcagcagtttggagatatg

SEQ ID NO: 405977 - DNA, 20 bp, Artificial Sequence
  Description of Artificial Sequence: Synthetic oligonucleotide
  Target: LAMA2; (+) strand; PAM type: YTN; PAM sequence: TTA
gcagcagtttggagatatgt

SEQ ID NO: 405978 - DNA, 20 bp, Artificial Sequence
  Description of Artificial Sequence: Synthetic oligonucleotide
  Target: LAMA2; (+) strand; PAM type: YTN; PAM sequence: TTT
ggagatatgtaacaatttag

SEQ ID NO: 405979 - DNA, 20 bp, Artificial Sequence
  Description of Artificial Sequence: Synthetic oligonucleotide
  Target: LAMA2; (+) strand; PAM type: YTN; PAM sequence: TTG
gagatatgtaacaatttagg

SEQ ID NO: 405980 - DNA, 20 bp, Artificial Sequence
  Description of Artificial Sequence: Synthetic oligonucleotide
  Target: LAMA2; (+) strand; PAM type: YTN; PAM sequence: TTT
aggatgctacggagtctggt

SEQ ID NO: 405981 - DNA, 20 bp, Artificial Sequence
  Description of Artificial Sequence: Synthetic oligonucleotide
  Target: LAMA2; (+) strand; PAM type: YTN; PAM sequence: TTA
ggatgctacggagtctggtg

SEQ ID NO: 405982 - DNA, 20 bp, Artificial Sequence
  Description of Artificial Sequence: Synthetic oligonucleotide
  Target: LAMA2; (+) strand; PAM type: YTN; PAM sequence: CTA
cggagtctggtgagcctagt

SEQ ID NO: 405983 - DNA, 20 bp, Artificial Sequence
  Description of Artificial Sequence: Synthetic oligonucleotide
  Target: LAMA2; (+) strand; PAM type: YTN; PAM sequence: CTG
gtgagcctagtgtctcccca

SEQ ID NO: 405984 - DNA, 20 bp, Artificial Sequence
  Description of Artificial Sequence: Synthetic oligonucleotide
  Target: LAMA2; (+) strand; PAM type: YTN; PAM sequence: CTA
gtgtctccccaccaacttct

SEQ ID NO: 405985 - DNA, 20 bp, Artificial Sequence
  Description of Artificial Sequence: Synthetic oligonucleotide
  Target: LAMA2; (+) strand; PAM type: YTN; PAM sequence: CTC
cccaccaacttctcttctat

SEQ ID NO: 405986 - DNA, 20 bp, Artificial Sequence
  Description of Artificial Sequence: Synthetic oligonucleotide
  Target: LAMA2; (+) strand; PAM type: YTN; PAM sequence: CTT
ctcttctatagtagtagaat

SEQ ID NO: 405987 - DNA, 20 bp, Artificial Sequence
  Description of Artificial Sequence: Synthetic oligonucleotide
  Target: LAMA2; (+) strand; PAM type: YTN; PAM sequence: TTC
tcttctatagtagtagaata

SEQ ID NO: 405988 - DNA, 20 bp, Artificial Sequence
  Description of Artificial Sequence: Synthetic oligonucleotide
  Target: LAMA2; (+) strand; PAM type: YTN; PAM sequence: CTC
ttctatagtagtagaataac

SEQ ID NO: 405989 - DNA, 20 bp, Artificial Sequence
  Description of Artificial Sequence: Synthetic oligonucleotide
  Target: LAMA2; (+) strand; PAM type: YTN; PAM sequence: CTT
ctatagtagtagaataacag

SEQ ID NO: 405990 - DNA, 20 bp, Artificial Sequence
  Description of Artificial Sequence: Synthetic oligonucleotide
  Target: LAMA2; (+) strand; PAM type: YTN; PAM sequence: TTC
tatagtagtagaataacaga

SEQ ID NO: 405991 - DNA, 20 bp, Artificial Sequence
  Description of Artificial Sequence: Synthetic oligonucleotide
  Target: LAMA2; (+) strand; PAM type: YTN; PAM sequence: CTA
tagtagtagaataacagatt

SEQ ID NO: 405992 - DNA, 20 bp, Artificial Sequence
  Description of Artificial Sequence: Synthetic oligonucleotide
  Target: LAMA2; (+) strand; PAM type: YTN; PAM sequence: TTT
gaagaaagaaggagaagatg

SEQ ID NO: 405993 - DNA, 20 bp, Artificial Sequence
  Description of Artificial Sequence: Synthetic oligonucleotide
  Target: LAMA2; (+) strand; PAM type: YTN; PAM sequence: TTG
aagaaagaaggagaagatgg

SEQ ID NO: 405994 - DNA, 20 bp, Artificial Sequence
  Description of Artificial Sequence: Synthetic oligonucleotide
  Target: LAMA2; (+) strand; PAM type: YTN; PAM sequence: TTA
taaaagaaaaaaagacaacc

SEQ ID NO: 405995 - DNA, 20 bp, Artificial Sequence
  Description of Artificial Sequence: Synthetic oligonucleotide
  Target: LAMA2; (+) strand; PAM type: YTN; PAM sequence: CTA
aatgtccatcaacagatgac

SEQ ID NO: 405996 - DNA, 20 bp, Artificial Sequence
  Description of Artificial Sequence: Synthetic oligonucleotide
  Target: LAMA2; (+) strand; PAM type: YTN; PAM sequence: CTG
agaaaagaaaatgtggtata

SEQ ID NO: 405997 - DNA, 20 bp, Artificial Sequence
  Description of Artificial Sequence: Synthetic oligonucleotide
  Target: LAMA2; (+) strand; PAM type: YTN; PAM sequence: CTA
tgcagccataaaaaaagaag

SEQ ID NO: 405998 - DNA, 20 bp, Artificial Sequence
  Description of Artificial Sequence: Synthetic oligonucleotide
  Target: LAMA2; (+) strand; PAM type: YTN; PAM sequence: CTT
ttgcagcaacaggaatggac

SEQ ID NO: 405999 - DNA, 20 bp, Artificial Sequence
  Description of Artificial Sequence: Synthetic oligonucleotide
  Target: LAMA2; (+) strand; PAM type: YTN; PAM sequence: TTT
tgcagcaacaggaatggacc

SEQ ID NO: 406000 - DNA, 20 bp, Artificial Sequence
  Description of Artificial Sequence: Synthetic oligonucleotide
  Target: LAMA2; (+) strand; PAM type: YTN; PAM sequence: TTT
gcagcaacaggaatggacct

SEQ ID NO: 406001 - DNA, 20 bp, Artificial Sequence
  Description of Artificial Sequence: Synthetic oligonucleotide
  Target: LAMA2; (+) strand; PAM type: YTN; PAM sequence: TTG
cagcaacaggaatggacctg

SEQ ID NO: 406002 - DNA, 20 bp, Artificial Sequence
  Description of Artificial Sequence: Synthetic oligonucleotide
  Target: LAMA2; (+) strand; PAM type: YTN; PAM sequence: CTG
gaggtcattatcctaagtga

SEQ ID NO: 406003 - DNA, 20 bp, Artificial Sequence
  Description of Artificial Sequence: Synthetic oligonucleotide
  Target: LAMA2; (+) strand; PAM type: YTN; PAM sequence: TTA
tcctaagtgacataacccag

SEQ ID NO: 406004 - DNA, 20 bp, Artificial Sequence
  Description of Artificial Sequence: Synthetic oligonucleotide
  Target: LAMA2; (+) strand; PAM type: YTN; PAM sequence: CTA
agtgacataacccagaaaca

SEQ ID NO: 406005 - DNA, 20 bp, Artificial Sequence
  Description of Artificial Sequence: Synthetic oligonucleotide
  Target: LAMA2; (+) strand; PAM type: YTN; PAM sequence: TTC
tcacttacaaggcgagaagc

SEQ ID NO: 406006 - DNA, 20 bp, Artificial Sequence
  Description of Artificial Sequence: Synthetic oligonucleotide
  Target: LAMA2; (+) strand; PAM type: YTN; PAM sequence: CTC
acttacaaggcgagaagcta

SEQ ID NO: 406007 - DNA, 20 bp, Artificial Sequence
  Description of Artificial Sequence: Synthetic oligonucleotide
  Target: LAMA2; (+) strand; PAM type: YTN; PAM sequence: CTT
acaaggcgagaagctaaaca

SEQ ID NO: 406008 - DNA, 20 bp, Artificial Sequence
  Description of Artificial Sequence: Synthetic oligonucleotide
  Target: LAMA2; (+) strand; PAM type: YTN; PAM sequence: TTA
caaggcgagaagctaaacaa

SEQ ID NO: 406009 - DNA, 20 bp, Artificial Sequence
  Description of Artificial Sequence: Synthetic oligonucleotide
  Target: LAMA2; (+) strand; PAM type: YTN; PAM sequence: CTA
aacaatggatacacgaagac

SEQ ID NO: 406010 - DNA, 20 bp, Artificial Sequence
  Description of Artificial Sequence: Synthetic oligonucleotide
  Target: LAMA2; (+) strand; PAM type: YTN; PAM sequence: CTG
gggactccaaaaggggggag

SEQ ID NO: 406011 - DNA, 20 bp, Artificial Sequence
  Description of Artificial Sequence: Synthetic oligonucleotide
  Target: LAMA2; (+) strand; PAM type: YTN; PAM sequence: CTC
caaaaggggggagggaggag

SEQ ID NO: 406012 - DNA, 20 bp, Artificial Sequence
  Description of Artificial Sequence: Synthetic oligonucleotide
  Target: LAMA2; (+) strand; PAM type: YTN; PAM sequence: TTT
aaaaatcgcctgttgggtac

SEQ ID NO: 406013 - DNA, 20 bp, Artificial Sequence
  Description of Artificial Sequence: Synthetic oligonucleotide
  Target: LAMA2; (+) strand; PAM type: YTN; PAM sequence: TTA
aaaatcgcctgttgggtaca

SEQ ID NO: 406014 - DNA, 20 bp, Artificial Sequence
  Description of Artificial Sequence: Synthetic oligonucleotide
  Target: LAMA2; (+) strand; PAM type: YTN; PAM sequence: CTG
ttgggtacagtgttcactgt

SEQ ID NO: 406015 - DNA, 20 bp, Artificial Sequence
  Description of Artificial Sequence: Synthetic oligonucleotide
  Target: LAMA2; (+) strand; PAM type: YTN; PAM sequence: TTG
ggtacagtgttcactgtgtg

SEQ ID NO: 406016 - DNA, 20 bp, Artificial Sequence
  Description of Artificial Sequence: Synthetic oligonucleotide
  Target: LAMA2; (+) strand; PAM type: YTN; PAM sequence: TTC
actgtgtgggtgatgggtcc

SEQ ID NO: 406017 - DNA, 20 bp, Artificial Sequence
  Description of Artificial Sequence: Synthetic oligonucleotide
  Target: LAMA2; (+) strand; PAM type: YTN; PAM sequence: CTG
tgtgggtgatgggtccacta

SEQ ID NO: 406018 - DNA, 20 bp, Artificial Sequence
  Description of Artificial Sequence: Synthetic oligonucleotide
  Target: LAMA2; (+) strand; PAM type: YTN; PAM sequence: CTA
gaagcccaaacttcactctt

SEQ ID NO: 406019 - DNA, 20 bp, Artificial Sequence
  Description of Artificial Sequence: Synthetic oligonucleotide
  Target: LAMA2; (+) strand; PAM type: YTN; PAM sequence: CTT
cactcttatgcaatatatcc

SEQ ID NO: 406020 - DNA, 20 bp, Artificial Sequence
  Description of Artificial Sequence: Synthetic oligonucleotide
  Target: LAMA2; (+) strand; PAM type: YTN; PAM sequence: TTC
actcttatgcaatatatcca

SEQ ID NO: 406021 - DNA, 20 bp, Artificial Sequence
  Description of Artificial Sequence: Synthetic oligonucleotide
  Target: LAMA2; (+) strand; PAM type: YTN; PAM sequence: CTC
ttatgcaatatatccatgaa

SEQ ID NO: 406022 - DNA, 20 bp, Artificial Sequence
  Description of Artificial Sequence: Synthetic oligonucleotide
  Target: LAMA2; (+) strand; PAM type: YTN; PAM sequence: CTT
atgcaatatatccatgaaac

SEQ ID NO: 406023 - DNA, 20 bp, Artificial Sequence
  Description of Artificial Sequence: Synthetic oligonucleotide
  Target: LAMA2; (+) strand; PAM type: YTN; PAM sequence: TTA
tgcaatatatccatgaaaca

SEQ ID NO: 406024 - DNA, 20 bp, Artificial Sequence
  Description of Artificial Sequence: Synthetic oligonucleotide
  Target: LAMA2; (+) strand; PAM type: YTN; PAM sequence: CTT
catatgcaccacctggatct

SEQ ID NO: 406025 - DNA, 20 bp, Artificial Sequence
  Description of Artificial Sequence: Synthetic oligonucleotide
  Target: LAMA2; (+) strand; PAM type: YTN; PAM sequence: TTC
atatgcaccacctggatcta

SEQ ID NO: 406026 - DNA, 20 bp, Artificial Sequence
  Description of Artificial Sequence: Synthetic oligonucleotide
  Target: LAMA2; (+) strand; PAM type: YTN; PAM sequence: CTG
gatctaaaattgtgaaataa

SEQ ID NO: 406027 - DNA, 20 bp, Artificial Sequence
  Description of Artificial Sequence: Synthetic oligonucleotide
  Target: LAMA2; (+) strand; PAM type: YTN; PAM sequence: CTA
aaattgtgaaataataaaaa

SEQ ID NO: 406028 - DNA, 20 bp, Artificial Sequence
  Description of Artificial Sequence: Synthetic oligonucleotide
  Target: LAMA2; (+) strand; PAM type: YTN; PAM sequence: TTG
tgaaataataaaaataaaaa

SEQ ID NO: 406029 - DNA, 20 bp, Artificial Sequence
  Description of Artificial Sequence: Synthetic oligonucleotide
  Target: LAMA2; (+) strand; PAM type: YTN; PAM sequence: TTC
ggaacactaagctgaattgg

SEQ ID NO: 406030 - DNA, 20 bp, Artificial Sequence
  Description of Artificial Sequence: Synthetic oligonucleotide
  Target: LAMA2; (+) strand; PAM type: YTN; PAM sequence: CTA
agctgaattggctaatgcta

SEQ ID NO: 406031 - DNA, 20 bp, Artificial Sequence
  Description of Artificial Sequence: Synthetic oligonucleotide
  Target: LAMA2; (+) strand; PAM type: YTN; PAM sequence: CTG
aattggctaatgctataaac

SEQ ID NO: 406032 - DNA, 20 bp, Artificial Sequence
  Description of Artificial Sequence: Synthetic oligonucleotide
  Target: LAMA2; (+) strand; PAM type: YTN; PAM sequence: TTG
gctaatgctataaactctaa

SEQ ID NO: 406033 - DNA, 20 bp, Artificial Sequence
  Description of Artificial Sequence: Synthetic oligonucleotide
  Target: LAMA2; (+) strand; PAM type: YTN; PAM sequence: CTA
atgctataaactctaaagat

SEQ ID NO: 406034 - DNA, 20 bp, Artificial Sequence
  Description of Artificial Sequence: Synthetic oligonucleotide
  Target: LAMA2; (+) strand; PAM type: YTN; PAM sequence: CTA
taaactctaaagatagtaat

SEQ ID NO: 406035 - DNA, 20 bp, Artificial Sequence
  Description of Artificial Sequence: Synthetic oligonucleotide
  Target: LAMA2; (+) strand; PAM type: YTN; PAM sequence: CTC
taaagatagtaatatgcttg

SEQ ID NO: 406036 - DNA, 20 bp, Artificial Sequence
  Description of Artificial Sequence: Synthetic oligonucleotide
  Target: LAMA2; (+) strand; PAM type: YTN; PAM sequence: CTA
aagatagtaatatgcttggt

SEQ ID NO: 406037 - DNA, 20 bp, Artificial Sequence
  Description of Artificial Sequence: Synthetic oligonucleotide
  Target: LAMA2; (+) strand; PAM type: YTN; PAM sequence: CTT
ggtagatgtacggtataaca

SEQ ID NO: 406038 - DNA, 20 bp, Artificial Sequence
  Description of Artificial Sequence: Synthetic oligonucleotide
  Target: LAMA2; (+) strand; PAM type: YTN; PAM sequence: TTG
gtagatgtacggtataacaa

SEQ ID NO: 406039 - DNA, 20 bp, Artificial Sequence
  Description of Artificial Sequence: Synthetic oligonucleotide
  Target: LAMA2; (+) strand; PAM type: YTN; PAM sequence: TTC
aacaacttaggagaacaatt

SEQ ID NO: 406040 - DNA, 20 bp, Artificial Sequence
  Description of Artificial Sequence: Synthetic oligonucleotide
  Target: LAMA2; (+) strand; PAM type: YTN; PAM sequence: CTT
aggagaacaatttttataaa

SEQ ID NO: 406041 - DNA, 20 bp, Artificial Sequence
  Description of Artificial Sequence: Synthetic oligonucleotide
  Target: LAMA2; (+) strand; PAM type: YTN; PAM sequence: TTA
ggagaacaatttttataaat

SEQ ID NO: 406042 - DNA, 20 bp, Artificial Sequence
  Description of Artificial Sequence: Synthetic oligonucleotide
  Target: LAMA2; (+) strand; PAM type: YTN; PAM sequence: TTT
ttataaatggtcatcttgga

SEQ ID NO: 406043 - DNA, 20 bp, Artificial Sequence
  Description of Artificial Sequence: Synthetic oligonucleotide
  Target: LAMA2; (+) strand; PAM type: YTN; PAM sequence: TTT
tataaatggtcatcttggaa

SEQ ID NO: 406044 - DNA, 20 bp, Artificial Sequence
  Description of Artificial Sequence: Synthetic oligonucleotide
  Target: LAMA2; (+) strand; PAM type: YTN; PAM sequence: TTT
ataaatggtcatcttggaaa

SEQ ID NO: 406045 - DNA, 20 bp, Artificial Sequence
  Description of Artificial Sequence: Synthetic oligonucleotide
  Target: LAMA2; (+) strand; PAM type: YTN; PAM sequence: TTA
taaatggtcatcttggaaac

SEQ ID NO: 406046 - DNA, 20 bp, Artificial Sequence
  Description of Artificial Sequence: Synthetic oligonucleotide
  Target: LAMA2; (+) strand; PAM type: YTN; PAM sequence: CTT
ggaaacgctaatttccataa

SEQ ID NO: 406047 - DNA, 20 bp, Artificial Sequence
  Description of Artificial Sequence: Synthetic oligonucleotide
  Target: LAMA2; (+) strand; PAM type: YTN; PAM sequence: TTG
gaaacgctaatttccataat

SEQ ID NO: 406048 - DNA, 20 bp, Artificial Sequence
  Description of Artificial Sequence: Synthetic oligonucleotide
  Target: LAMA2; (+) strand; PAM type: YTN; PAM sequence: CTA
atttccataatcagtctgct

SEQ ID NO: 406049 - DNA, 20 bp, Artificial Sequence
  Description of Artificial Sequence: Synthetic oligonucleotide
  Target: LAMA2; (+) strand; PAM type: YTN; PAM sequence: TTT
ccataatcagtctgctatct

SEQ ID NO: 406050 - DNA, 20 bp, Artificial Sequence
  Description of Artificial Sequence: Synthetic oligonucleotide
  Target: LAMA2; (+) strand; PAM type: YTN; PAM sequence: TTC
cataatcagtctgctatctc

SEQ ID NO: 406051 - DNA, 20 bp, Artificial Sequence
  Description of Artificial Sequence: Synthetic oligonucleotide
  Target: LAMA2; (+) strand; PAM type: YTN; PAM sequence: CTG
ctatctcaacttttattcta

SEQ ID NO: 406052 - DNA, 20 bp, Artificial Sequence
  Description of Artificial Sequence: Synthetic oligonucleotide
  Target: LAMA2; (+) strand; PAM type: YTN; PAM sequence: CTA
tctcaacttttattctatcc

SEQ ID NO: 406053 - DNA, 20 bp, Artificial Sequence
  Description of Artificial Sequence: Synthetic oligonucleotide
  Target: LAMA2; (+) strand; PAM type: YTN; PAM sequence: CTC
aacttttattctatccatta

SEQ ID NO: 406054 - DNA, 20 bp, Artificial Sequence
  Description of Artificial Sequence: Synthetic oligonucleotide
  Target: LAMA2; (+) strand; PAM type: YTN; PAM sequence: CTT
ttattctatccattaaaaca

SEQ ID NO: 406055 - DNA, 20 bp, Artificial Sequence
  Description of Artificial Sequence: Synthetic oligonucleotide
  Target: LAMA2; (+) strand; PAM type: YTN; PAM sequence: TTT
tattctatccattaaaacaa

SEQ ID NO: 406056 - DNA, 20 bp, Artificial Sequence
  Description of Artificial Sequence: Synthetic oligonucleotide
  Target: LAMA2; (+) strand; PAM type: YTN; PAM sequence: TTT
attctatccattaaaacaaa

SEQ ID NO: 406057 - DNA, 20 bp, Artificial Sequence
  Description of Artificial Sequence: Synthetic oligonucleotide
  Target: LAMA2; (+) strand; PAM type: YTN; PAM sequence: TTA
ttctatccattaaaacaaat

SEQ ID NO: 406058 - DNA, 20 bp, Artificial Sequence
  Description of Artificial Sequence: Synthetic oligonucleotide
  Target: LAMA2; (+) strand; PAM type: YTN; PAM sequence: TTC
tatccattaaaacaaataaa

SEQ ID NO: 406059 - DNA, 20 bp, Artificial Sequence
  Description of Artificial Sequence: Synthetic oligonucleotide
  Target: LAMA2; (+) strand; PAM type: YTN; PAM sequence: CTA
tccattaaaacaaataaaca

SEQ ID NO: 406060 - DNA, 20 bp, Artificial Sequence
  Description of Artificial Sequence: Synthetic oligonucleotide
  Target: LAMA2; (+) strand; PAM type: YTN; PAM sequence: TTA
aaacaaataaacaaaagatc

SEQ ID NO: 406061 - DNA, 20 bp, Artificial Sequence
  Description of Artificial Sequence: Synthetic oligonucleotide
  Target: LAMA2; (+) strand; PAM type: YTN; PAM sequence: CTG
tgctctgaatcaatattagt

SEQ ID NO: 406062 - DNA, 20 bp, Artificial Sequence
  Description of Artificial Sequence: Synthetic oligonucleotide
  Target: LAMA2; (+) strand; PAM type: YTN; PAM sequence: CTC
tgaatcaatattagtcaaag

SEQ ID NO: 406063 - DNA, 20 bp, Artificial Sequence
  Description of Artificial Sequence: Synthetic oligonucleotide
  Target: LAMA2; (+) strand; PAM type: YTN; PAM sequence: CTG
aatcaatattagtcaaaggt

SEQ ID NO: 406064 - DNA, 20 bp, Artificial Sequence
  Description of Artificial Sequence: Synthetic oligonucleotide
  Target: LAMA2; (+) strand; PAM type: YTN; PAM sequence: TTA
gtcaaaggtcaagttacaga

SEQ ID NO: 406065 - DNA, 20 bp, Artificial Sequence
  Description of Artificial Sequence: Synthetic oligonucleotide
  Target: LAMA2; (+) strand; PAM type: YTN; PAM sequence: TTA
cagaatcatataaatgtgaa

SEQ ID NO: 406066 - DNA, 20 bp, Artificial Sequence
  Description of Artificial Sequence: Synthetic oligonucleotide
  Target: LAMA2; (+) strand; PAM type: YTN; PAM sequence: TTA
aaaatatgttttaggtttac

SEQ ID NO: 406067 - DNA, 20 bp, Artificial Sequence
  Description of Artificial Sequence: Synthetic oligonucleotide
  Target: LAMA2; (+) strand; PAM type: YTN; PAM sequence: TTT
taggtttactgtaactacag

SEQ ID NO: 406068 - DNA, 20 bp, Artificial Sequence
  Description of Artificial Sequence: Synthetic oligonucleotide
  Target: LAMA2; (+) strand; PAM type: YTN; PAM sequence: TTT
aggtttactgtaactacagc

SEQ ID NO: 406069 - DNA, 20 bp, Artificial Sequence
  Description of Artificial Sequence: Synthetic oligonucleotide
  Target: LAMA2; (+) strand; PAM type: YTN; PAM sequence: TTA
ggtttactgtaactacagca

SEQ ID NO: 406070 - DNA, 20 bp, Artificial Sequence
  Description of Artificial Sequence: Synthetic oligonucleotide
  Target: LAMA2; (+) strand; PAM type: YTN; PAM sequence: TTT
actgtaactacagcattcca

SEQ ID NO: 406071 - DNA, 20 bp, Artificial Sequence
  Description of Artificial Sequence: Synthetic oligonucleotide
  Target: LAMA2; (+) strand; PAM type: YTN; PAM sequence: TTA
ctgtaactacagcattccat

SEQ ID NO: 406072 - DNA, 20 bp, Artificial Sequence
  Description of Artificial Sequence: Synthetic oligonucleotide
  Target: LAMA2; (+) strand; PAM type: YTN; PAM sequence: CTG
taactacagcattccatcaa

SEQ ID NO: 406073 - DNA, 20 bp, Artificial Sequence
  Description of Artificial Sequence: Synthetic oligonucleotide
  Target: LAMA2; (+) strand; PAM type: YTN; PAM sequence: CTA
cagcattccatcaattcaga

SEQ ID NO: 406074 - DNA, 20 bp, Artificial Sequence
  Description of Artificial Sequence: Synthetic oligonucleotide
  Target: LAMA2; (+) strand; PAM type: YTN; PAM sequence: TTC
catcaattcagaaagttctt

SEQ ID NO: 406075 - DNA, 20 bp, Artificial Sequence
  Description of Artificial Sequence: Synthetic oligonucleotide
  Target: LAMA2; (+) strand; PAM type: YTN; PAM sequence: TTC
agaaagttcttcccccaata

SEQ ID NO: 406076 - DNA, 20 bp, Artificial Sequence
  Description of Artificial Sequence: Synthetic oligonucleotide
  Target: LAMA2; (+) strand; PAM type: YTN; PAM sequence: TTC
ttcccccaataggtctaatt

SEQ ID NO: 406077 - DNA, 20 bp, Artificial Sequence
  Description of Artificial Sequence: Synthetic oligonucleotide
  Target: LAMA2; (+) strand; PAM type: YTN; PAM sequence: CTT
cccccaataggtctaatttt

SEQ ID NO: 406078 - DNA, 20 bp, Artificial Sequence
  Description of Artificial Sequence: Synthetic oligonucleotide
  Target: LAMA2; (+) strand; PAM type: YTN; PAM sequence: TTC
ccccaataggtctaattttt

SEQ ID NO: 406079 - DNA, 20 bp, Artificial Sequence
  Description of Artificial Sequence: Synthetic oligonucleotide
  Target: LAMA2; (+) strand; PAM type: YTN; PAM sequence: CTA
atttttccagattttactag

SEQ ID NO: 406080 - DNA, 20 bp, Artificial Sequence
  Description of Artificial Sequence: Synthetic oligonucleotide
  Target: LAMA2; (+) strand; PAM type: YTN; PAM sequence: TTT
ttccagattttactagagct

SEQ ID NO: 406081 - DNA, 20 bp, Artificial Sequence
  Description of Artificial Sequence: Synthetic oligonucleotide
  Target: LAMA2; (+) strand; PAM type: YTN; PAM sequence: TTT
tccagattttactagagcta

SEQ ID NO: 406082 - DNA, 20 bp, Artificial Sequence
  Description of Artificial Sequence: Synthetic oligonucleotide
  Target: LAMA2; (+) strand; PAM type: YTN; PAM sequence: TTT
ccagattttactagagctac

SEQ ID NO: 406083 - DNA, 20 bp, Artificial Sequence
  Description of Artificial Sequence: Synthetic oligonucleotide
  Target: LAMA2; (+) strand; PAM type: YTN; PAM sequence: TTC
cagattttactagagctact

SEQ ID NO: 406084 - DNA, 20 bp, Artificial Sequence
  Description of Artificial Sequence: Synthetic oligonucleotide
  Target: LAMA2; (+) strand; PAM type: YTN; PAM sequence: TTT
tactagagctactaactgtt

SEQ ID NO: 406085 - DNA, 20 bp, Artificial Sequence
  Description of Artificial Sequence: Synthetic oligonucleotide
  Target: LAMA2; (+) strand; PAM type: YTN; PAM sequence: TTT
actagagctactaactgtta

SEQ ID NO: 406086 - DNA, 20 bp, Artificial Sequence
  Description of Artificial Sequence: Synthetic oligonucleotide
  Target: LAMA2; (+) strand; PAM type: YTN; PAM sequence: TTA
ctagagctactaactgttac

SEQ ID NO: 406087 - DNA, 20 bp, Artificial Sequence
  Description of Artificial Sequence: Synthetic oligonucleotide
  Target: LAMA2; (+) strand; PAM type: YTN; PAM sequence: CTA
gagctactaactgttactgt

SEQ ID NO: 406088 - DNA, 20 bp, Artificial Sequence
  Description of Artificial Sequence: Synthetic oligonucleotide
  Target: LAMA2; (+) strand; PAM type: YTN; PAM sequence: CTA
ctaactgttactgttactac

SEQ ID NO: 406089 - DNA, 20 bp, Artificial Sequence
  Description of Artificial Sequence: Synthetic oligonucleotide
  Target: LAMA2; (+) strand; PAM type: YTN; PAM sequence: CTA
actgttactgttactactct

SEQ ID NO: 406090 - DNA, 20 bp, Artificial Sequence
  Description of Artificial Sequence: Synthetic oligonucleotide
  Target: LAMA2; (+) strand; PAM type: YTN; PAM sequence: CTG
ttactgttactactctgtgg

SEQ ID NO: 406091 - DNA, 20 bp, Artificial Sequence
  Description of Artificial Sequence: Synthetic oligonucleotide
  Target: LAMA2; (+) strand; PAM type: YTN; PAM sequence: TTA
ctgttactactctgtggtcc

SEQ ID NO: 406092 - DNA, 20 bp, Artificial Sequence
  Description of Artificial Sequence: Synthetic oligonucleotide
  Target: LAMA2; (+) strand; PAM type: YTN; PAM sequence: CTG
ttactactctgtggtccaga

SEQ ID NO: 406093 - DNA, 20 bp, Artificial Sequence
  Description of Artificial Sequence: Synthetic oligonucleotide
  Target: LAMA2; (+) strand; PAM type: YTN; PAM sequence: TTA
ctactctgtggtccagaaat

SEQ ID NO: 406094 - DNA, 20 bp, Artificial Sequence
  Description of Artificial Sequence: Synthetic oligonucleotide
  Target: LAMA2; (+) strand; PAM type: YTN; PAM sequence: CTA
ctctgtggtccagaaatcag

SEQ ID NO: 406095 - DNA, 20 bp, Artificial Sequence
  Description of Artificial Sequence: Synthetic oligonucleotide
  Target: LAMA2; (+) strand; PAM type: YTN; PAM sequence: CTC
tgtggtccagaaatcagaaa

SEQ ID NO: 406096 - DNA, 20 bp, Artificial Sequence
  Description of Artificial Sequence: Synthetic oligonucleotide
  Target: LAMA2; (+) strand; PAM type: YTN; PAM sequence: CTG
tggtccagaaatcagaaaga

SEQ ID NO: 406097 - DNA, 20 bp, Artificial Sequence
  Description of Artificial Sequence: Synthetic oligonucleotide
  Target: LAMA2; (+) strand; PAM type: YTN; PAM sequence: TTT
tcctttatcccagcctactc

SEQ ID NO: 406098 - DNA, 20 bp, Artificial Sequence
  Description of Artificial Sequence: Synthetic oligonucleotide
  Target: LAMA2; (+) strand; PAM type: YTN; PAM sequence: TTT
cctttatcccagcctactca

SEQ ID NO: 406099 - DNA, 20 bp, Artificial Sequence
  Description of Artificial Sequence: Synthetic oligonucleotide
  Target: LAMA2; (+) strand; PAM type: YTN; PAM sequence: TTC
ctttatcccagcctactcag

SEQ ID NO: 406100 - DNA, 20 bp, Artificial Sequence
  Description of Artificial Sequence: Synthetic oligonucleotide
  Target: LAMA2; (+) strand; PAM type: YTN; PAM sequence: CTT
tatcccagcctactcagtat

SEQ ID NO: 406101 - DNA, 20 bp, Artificial Sequence
  Description of Artificial Sequence: Synthetic oligonucleotide
  Target: LAMA2; (+) strand; PAM type: YTN; PAM sequence: TTT
atcccagcctactcagtatc

SEQ ID NO: 406102 - DNA, 20 bp, Artificial Sequence
  Description of Artificial Sequence: Synthetic oligonucleotide
  Target: LAMA2; (+) strand; PAM type: YTN; PAM sequence: TTA
tcccagcctactcagtatct

SEQ ID NO: 406103 - DNA, 20 bp, Artificial Sequence
  Description of Artificial Sequence: Synthetic oligonucleotide
  Target: LAMA2; (+) strand; PAM type: YTN; PAM sequence: CTA
ctcagtatcttctgtgacat

SEQ ID NO: 406104 - DNA, 20 bp, Artificial Sequence
  Description of Artificial Sequence: Synthetic oligonucleotide
  Target: LAMA2; (+) strand; PAM type: YTN; PAM sequence: CTC
agtatcttctgtgacatttc

SEQ ID NO: 406105 - DNA, 20 bp, Artificial Sequence
  Description of Artificial Sequence: Synthetic oligonucleotide
  Target: LAMA2; (+) strand; PAM type: YTN; PAM sequence: CTT
ctgtgacatttctggtttct

SEQ ID NO: 406106 - DNA, 20 bp, Artificial Sequence
  Description of Artificial Sequence: Synthetic oligonucleotide
  Target: LAMA2; (+) strand; PAM type: YTN; PAM sequence: TTC
tgtgacatttctggtttcta

SEQ ID NO: 406107 - DNA, 20 bp, Artificial Sequence
  Description of Artificial Sequence: Synthetic oligonucleotide
  Target: LAMA2; (+) strand; PAM type: YTN; PAM sequence: CTG
tgacatttctggtttctagt

SEQ ID NO: 406108 - DNA, 20 bp, Artificial Sequence
  Description of Artificial Sequence: Synthetic oligonucleotide
  Target: LAMA2; (+) strand; PAM type: YTN; PAM sequence: TTT
ctggtttctagttcaatccc

SEQ ID NO: 406109 - DNA, 20 bp, Artificial Sequence
  Description of Artificial Sequence: Synthetic oligonucleotide
  Target: LAMA2; (+) strand; PAM type: YTN; PAM sequence: TTC
tggtttctagttcaatccct

SEQ ID NO: 406110 - DNA, 20 bp, Artificial Sequence
  Description of Artificial Sequence: Synthetic oligonucleotide
  Target: LAMA2; (+) strand; PAM type: YTN; PAM sequence: CTG
gtttctagttcaatcccttt

SEQ ID NO: 406111 - DNA, 20 bp, Artificial Sequence
  Description of Artificial Sequence: Synthetic oligonucleotide
  Target: LAMA2; (+) strand; PAM type: YTN; PAM sequence: TTT
ctagttcaatccctttgaca

SEQ ID NO: 406112 - DNA, 20 bp, Artificial Sequence
  Description of Artificial Sequence: Synthetic oligonucleotide
  Target: LAMA2; (+) strand; PAM type: YTN; PAM sequence: TTC
tagttcaatccctttgacac

SEQ ID NO: 406113 - DNA, 20 bp, Artificial Sequence
  Description of Artificial Sequence: Synthetic oligonucleotide
  Target: LAMA2; (+) strand; PAM type: YTN; PAM sequence: CTA
gttcaatccctttgacacag

SEQ ID NO: 406114 - DNA, 20 bp, Artificial Sequence
  Description of Artificial Sequence: Synthetic oligonucleotide
  Target: LAMA2; (+) strand; PAM type: YTN; PAM sequence: TTC
aatccctttgacacagttgg

SEQ ID NO: 406115 - DNA, 20 bp, Artificial Sequence
  Description of Artificial Sequence: Synthetic oligonucleotide
  Target: LAMA2; (+) strand; PAM type: YTN; PAM sequence: CTT
tgacacagttggctgatacc

SEQ ID NO: 406116 - DNA, 20 bp, Artificial Sequence
  Description of Artificial Sequence: Synthetic oligonucleotide
  Target: LAMA2; (+) strand; PAM type: YTN; PAM sequence: TTT
gacacagttggctgatacct

SEQ ID NO: 406117 - DNA, 20 bp, Artificial Sequence
  Description of Artificial Sequence: Synthetic oligonucleotide
  Target: LAMA2; (+) strand; PAM type: YTN; PAM sequence: TTG
acacagttggctgatacctt

SEQ ID NO: 406118 - DNA, 20 bp, Artificial Sequence
  Description of Artificial Sequence: Synthetic oligonucleotide
  Target: LAMA2; (+) strand; PAM type: YTN; PAM sequence: TTG
gctgataccttctcatttat

SEQ ID NO: 406119 - DNA, 20 bp, Artificial Sequence
  Description of Artificial Sequence: Synthetic oligonucleotide
  Target: LAMA2; (+) strand; PAM type: YTN; PAM sequence: CTG
ataccttctcatttataagt

SEQ ID NO: 406120 - DNA, 20 bp, Artificial Sequence
  Description of Artificial Sequence: Synthetic oligonucleotide
  Target: LAMA2; (+) strand; PAM type: YTN; PAM sequence: CTT
ctcatttataagtcttctcc

SEQ ID NO: 406121 - DNA, 20 bp, Artificial Sequence
  Description of Artificial Sequence: Synthetic oligonucleotide
  Target: LAMA2; (+) strand; PAM type: YTN; PAM sequence: TTC
tcatttataagtcttctcct

SEQ ID NO: 406122 - DNA, 20 bp, Artificial Sequence
  Description of Artificial Sequence: Synthetic oligonucleotide
  Target: LAMA2; (+) strand; PAM type: YTN; PAM sequence: CTC
atttataagtcttctccttg

SEQ ID NO: 406123 - DNA, 20 bp, Artificial Sequence
  Description of Artificial Sequence: Synthetic oligonucleotide
  Target: LAMA2; (+) strand; PAM type: YTN; PAM sequence: TTT
ataagtcttctccttggctt

SEQ ID NO: 406124 - DNA, 20 bp, Artificial Sequence
  Description of Artificial Sequence: Synthetic oligonucleotide
  Target: LAMA2; (+) strand; PAM type: YTN; PAM sequence: TTA
taagtcttctccttggcttt

SEQ ID NO: 406125 - DNA, 20 bp, Artificial Sequence
  Description of Artificial Sequence: Synthetic oligonucleotide
  Target: LAMA2; (+) strand; PAM type: YTN; PAM sequence: CTT
ctccttggctttcaaattga

SEQ ID NO: 406126 - DNA, 20 bp, Artificial Sequence
  Description of Artificial Sequence: Synthetic oligonucleotide
  Target: LAMA2; (+) strand; PAM type: YTN; PAM sequence: TTC
tccttggctttcaaattgac

SEQ ID NO: 406127 - DNA, 20 bp, Artificial Sequence
  Description of Artificial Sequence: Synthetic oligonucleotide
  Target: LAMA2; (+) strand; PAM type: YTN; PAM sequence: CTC
cttggctttcaaattgactc

SEQ ID NO: 406128 - DNA, 20 bp, Artificial Sequence
  Description of Artificial Sequence: Synthetic oligonucleotide
  Target: LAMA2; (+) strand; PAM type: YTN; PAM sequence: CTT
ggctttcaaattgactctag

SEQ ID NO: 406129 - DNA, 20 bp, Artificial Sequence
  Description of Artificial Sequence: Synthetic oligonucleotide
  Target: LAMA2; (+) strand; PAM type: YTN; PAM sequence: TTG
gctttcaaattgactctaga

SEQ ID NO: 406130 - DNA, 20 bp, Artificial Sequence
  Description of Artificial Sequence: Synthetic oligonucleotide
  Target: LAMA2; (+) strand; PAM type: YTN; PAM sequence: CTT
tcaaattgactctagactca

SEQ ID NO: 406131 - DNA, 20 bp, Artificial Sequence
  Description of Artificial Sequence: Synthetic oligonucleotide
  Target: LAMA2; (+) strand; PAM type: YTN; PAM sequence: TTT
caaattgactctagactcac

SEQ ID NO: 406132 - DNA, 20 bp, Artificial Sequence
  Description of Artificial Sequence: Synthetic oligonucleotide
  Target: LAMA2; (+) strand; PAM type: YTN; PAM sequence: TTC
aaattgactctagactcaca

SEQ ID NO: 406133 - DNA, 20 bp, Artificial Sequence
  Description of Artificial Sequence: Synthetic oligonucleotide
  Target: LAMA2; (+) strand; PAM type: YTN; PAM sequence: TTG
actctagactcacattgctt

SEQ ID NO: 406134 - DNA, 20 bp, Artificial Sequence
  Description of Artificial Sequence: Synthetic oligonucleotide
  Target: LAMA2; (+) strand; PAM type: YTN; PAM sequence: CTC
tagactcacattgctttttg

SEQ ID NO: 406135 - DNA, 20 bp, Artificial Sequence
  Description of Artificial Sequence: Synthetic oligonucleotide
  Target: LAMA2; (+) strand; PAM type: YTN; PAM sequence: CTA
gactcacattgctttttgcc

SEQ ID NO: 406136 - DNA, 20 bp, Artificial Sequence
  Description of Artificial Sequence: Synthetic oligonucleotide
  Target: LAMA2; (+) strand; PAM type: YTN; PAM sequence: CTC
acattgctttttgcctttct

SEQ ID NO: 406137 - DNA, 20 bp, Artificial Sequence
  Description of Artificial Sequence: Synthetic oligonucleotide
  Target: LAMA2; (+) strand; PAM type: YTN; PAM sequence: TTG
ctttttgcctttctgaatac

SEQ ID NO: 406138 - DNA, 20 bp, Artificial Sequence
  Description of Artificial Sequence: Synthetic oligonucleotide
  Target: LAMA2; (+) strand; PAM type: YTN; PAM sequence: CTT
tttgcctttctgaatactcc

SEQ ID NO: 406139 - DNA, 20 bp, Artificial Sequence
  Description of Artificial Sequence: Synthetic oligonucleotide
  Target: LAMA2; (+) strand; PAM type: YTN; PAM sequence: TTT
ttgcctttctgaatactcct

SEQ ID NO: 406140 - DNA, 20 bp, Artificial Sequence
  Description of Artificial Sequence: Synthetic oligonucleotide
  Target: LAMA2; (+) strand; PAM type: YTN; PAM sequence: TTT
tgcctttctgaatactcctg

SEQ ID NO: 406141 - DNA, 20 bp, Artificial Sequence
  Description of Artificial Sequence: Synthetic oligonucleotide
  Target: LAMA2; (+) strand; PAM type: YTN; PAM sequence: TTT
gcctttctgaatactcctgt

SEQ ID NO: 406142 - DNA, 20 bp, Artificial Sequence
  Description of Artificial Sequence: Synthetic oligonucleotide
  Target: LAMA2; (+) strand; PAM type: YTN; PAM sequence: TTG
cctttctgaatactcctgtc

SEQ ID NO: 406143 - DNA, 20 bp, Artificial Sequence
  Description of Artificial Sequence: Synthetic oligonucleotide
  Target: LAMA2; (+) strand; PAM type: YTN; PAM sequence: CTT
tctgaatactcctgtcaaat

SEQ ID NO: 406144 - DNA, 20 bp, Artificial Sequence
  Description of Artificial Sequence: Synthetic oligonucleotide
  Target: LAMA2; (+) strand; PAM type: YTN; PAM sequence: TTT
ctgaatactcctgtcaaatg

SEQ ID NO: 406145 - DNA, 20 bp, Artificial Sequence
  Description of Artificial Sequence: Synthetic oligonucleotide
  Target: LAMA2; (+) strand; PAM type: YTN; PAM sequence: TTC
tgaatactcctgtcaaatgc

SEQ ID NO: 406146 - DNA, 20 bp, Artificial Sequence
  Description of Artificial Sequence: Synthetic oligonucleotide
  Target: LAMA2; (+) strand; PAM type: YTN; PAM sequence: CTG
aatactcctgtcaaatgcac

SEQ ID NO: 406147 - DNA, 20 bp, Artificial Sequence
  Description of Artificial Sequence: Synthetic oligonucleotide
  Target: LAMA2; (+) strand; PAM type: YTN; PAM sequence: CTC
ctgtcaaatgcaccaagcag

SEQ ID NO: 406148 - DNA, 20 bp, Artificial Sequence
  Description of Artificial Sequence: Synthetic oligonucleotide
  Target: LAMA2; (+) strand; PAM type: YTN; PAM sequence: CTG
tcaaatgcaccaagcagtca

SEQ ID NO: 406149 - DNA, 20 bp, Artificial Sequence
  Description of Artificial Sequence: Synthetic oligonucleotide
  Target: LAMA2; (+) strand; PAM type: YTN; PAM sequence: TTC
tcacttttattttgggtatt

SEQ ID NO: 406150 - DNA, 20 bp, Artificial Sequence
  Description of Artificial Sequence: Synthetic oligonucleotide
  Target: LAMA2; (+) strand; PAM type: YTN; PAM sequence: CTC
acttttattttgggtattaa

SEQ ID NO: 406151 - DNA, 20 bp, Artificial Sequence
  Description of Artificial Sequence: Synthetic oligonucleotide
  Target: LAMA2; (+) strand; PAM type: YTN; PAM sequence: CTT
ttattttgggtattaatgac

SEQ ID NO: 406152 - DNA, 20 bp, Artificial Sequence
  Description of Artificial Sequence: Synthetic oligonucleotide
  Target: LAMA2; (+) strand; PAM type: YTN; PAM sequence: TTT
tattttgggtattaatgaca

SEQ ID NO: 406153 - DNA, 20 bp, Artificial Sequence
  Description of Artificial Sequence: Synthetic oligonucleotide
  Target: LAMA2; (+) strand; PAM type: YTN; PAM sequence: TTT
attttgggtattaatgacat

SEQ ID NO: 406154 - DNA, 20 bp, Artificial Sequence
  Description of Artificial Sequence: Synthetic oligonucleotide
  Target: LAMA2; (+) strand; PAM type: YTN; PAM sequence: TTA
ttttgggtattaatgacatg

SEQ ID NO: 406155 - DNA, 20 bp, Artificial Sequence
  Description of Artificial Sequence: Synthetic oligonucleotide
  Target: LAMA2; (+) strand; PAM type: YTN; PAM sequence: TTT
tgggtattaatgacatgaat

SEQ ID NO: 406156 - DNA, 20 bp, Artificial Sequence
  Description of Artificial Sequence: Synthetic oligonucleotide
  Target: LAMA2; (+) strand; PAM type: YTN; PAM sequence: TTT
gggtattaatgacatgaatc

SEQ ID NO: 406157 - DNA, 20 bp, Artificial Sequence
  Description of Artificial Sequence: Synthetic oligonucleotide
  Target: LAMA2; (+) strand; PAM type: YTN; PAM sequence: TTG
ggtattaatgacatgaatca

SEQ ID NO: 406158 - DNA, 20 bp, Artificial Sequence
  Description of Artificial Sequence: Synthetic oligonucleotide
  Target: LAMA2; (+) strand; PAM type: YTN; PAM sequence: TTA
atgacatgaatcattctcct

SEQ ID NO: 406159 - DNA, 20 bp, Artificial Sequence
  Description of Artificial Sequence: Synthetic oligonucleotide
  Target: LAMA2; (+) strand; PAM type: YTN; PAM sequence: TTC
tccttacttctctattgtat

SEQ ID NO: 406160 - DNA, 20 bp, Artificial Sequence
  Description of Artificial Sequence: Synthetic oligonucleotide
  Target: LAMA2; (+) strand; PAM type: YTN; PAM sequence: CTC
cttacttctctattgtatct

SEQ ID NO: 406161 - DNA, 20 bp, Artificial Sequence
  Description of Artificial Sequence: Synthetic oligonucleotide
  Target: LAMA2; (+) strand; PAM type: YTN; PAM sequence: CTT
acttctctattgtatctcta

SEQ ID NO: 406162 - DNA, 20 bp, Artificial Sequence
  Description of Artificial Sequence: Synthetic oligonucleotide
  Target: LAMA2; (+) strand; PAM type: YTN; PAM sequence: TTA
cttctctattgtatctctat

SEQ ID NO: 406163 - DNA, 20 bp, Artificial Sequence
  Description of Artificial Sequence: Synthetic oligonucleotide
  Target: LAMA2; (+) strand; PAM type: YTN; PAM sequence: CTT
ctctattgtatctctatggt

SEQ ID NO: 406164 - DNA, 20 bp, Artificial Sequence
  Description of Artificial Sequence: Synthetic oligonucleotide
  Target: LAMA2; (+) strand; PAM type: YTN; PAM sequence: TTC
tctattgtatctctatggta

SEQ ID NO: 406165 - DNA, 20 bp, Artificial Sequence
  Description of Artificial Sequence: Synthetic oligonucleotide
  Target: LAMA2; (+) strand; PAM type: YTN; PAM sequence: CTC
tattgtatctctatggtatc

SEQ ID NO: 406166 - DNA, 20 bp, Artificial Sequence
  Description of Artificial Sequence: Synthetic oligonucleotide
  Target: LAMA2; (+) strand; PAM type: YTN; PAM sequence: CTA
ttgtatctctatggtatcac

SEQ ID NO: 406167 - DNA, 20 bp, Artificial Sequence
  Description of Artificial Sequence: Synthetic oligonucleotide
  Target: LAMA2; (+) strand; PAM type: YTN; PAM sequence: TTG
tatctctatggtatcaccgt

SEQ ID NO: 406168 - DNA, 20 bp, Artificial Sequence
  Description of Artificial Sequence: Synthetic oligonucleotide
  Target: LAMA2; (+) strand; PAM type: YTN; PAM sequence: CTC
tatggtatcaccgttaaaaa

SEQ ID NO: 406169 - DNA, 20 bp, Artificial Sequence
  Description of Artificial Sequence: Synthetic oligonucleotide
  Target: LAMA2; (+) strand; PAM type: YTN; PAM sequence: CTA
tggtatcaccgttaaaaaga

SEQ ID NO: 406170 - DNA, 20 bp, Artificial Sequence
  Description of Artificial Sequence: Synthetic oligonucleotide
  Target: LAMA2; (+) strand; PAM type: YTN; PAM sequence: TTA
aaaagaaattaagccctatg

SEQ ID NO: 406171 - DNA, 20 bp, Artificial Sequence
  Description of Artificial Sequence: Synthetic oligonucleotide
  Target: LAMA2; (+) strand; PAM type: YTN; PAM sequence: TTA
agccctatgaggtttagttg

SEQ ID NO: 406172 - DNA, 20 bp, Artificial Sequence
  Description of Artificial Sequence: Synthetic oligonucleotide
  Target: LAMA2; (+) strand; PAM type: YTN; PAM sequence: CTA
tgaggtttagttgttcagaa

SEQ ID NO: 406173 - DNA, 20 bp, Artificial Sequence
  Description of Artificial Sequence: Synthetic oligonucleotide
  Target: LAMA2; (+) strand; PAM type: YTN; PAM sequence: TTT
agttgttcagaattttgatt

SEQ ID NO: 406174 - DNA, 20 bp, Artificial Sequence
  Description of Artificial Sequence: Synthetic oligonucleotide
  Target: LAMA2; (+) strand; PAM type: YTN; PAM sequence: TTA
gttgttcagaattttgattc

SEQ ID NO: 406175 - DNA, 20 bp, Artificial Sequence
  Description of Artificial Sequence: Synthetic oligonucleotide
  Target: LAMA2; (+) strand; PAM type: YTN; PAM sequence: TTG
ttcagaattttgattcttaa

SEQ ID NO: 406176 - DNA, 20 bp, Artificial Sequence
  Description of Artificial Sequence: Synthetic oligonucleotide
  Target: LAMA2; (+) strand; PAM type: YTN; PAM sequence: TTC
agaattttgattcttaaatt

SEQ ID NO: 406177 - DNA, 20 bp, Artificial Sequence
  Description of Artificial Sequence: Synthetic oligonucleotide
  Target: LAMA2; (+) strand; PAM type: YTN; PAM sequence: TTT
tgattcttaaattagactgg

SEQ ID NO: 406178 - DNA, 20 bp, Artificial Sequence
  Description of Artificial Sequence: Synthetic oligonucleotide
  Target: LAMA2; (+) strand; PAM type: YTN; PAM sequence: TTT
gattcttaaattagactggg

SEQ ID NO: 406179 - DNA, 20 bp, Artificial Sequence
  Description of Artificial Sequence: Synthetic oligonucleotide
  Target: LAMA2; (+) strand; PAM type: YTN; PAM sequence: TTG
attcttaaattagactggga

SEQ ID NO: 406180 - DNA, 20 bp, Artificial Sequence
  Description of Artificial Sequence: Synthetic oligonucleotide
  Target: LAMA2; (+) strand; PAM type: YTN; PAM sequence: TTC
ttaaattagactgggaactt

SEQ ID NO: 406181 - DNA, 20 bp, Artificial Sequence
  Description of Artificial Sequence: Synthetic oligonucleotide
  Target: LAMA2; (+) strand; PAM type: YTN; PAM sequence: CTT
aaattagactgggaacttct

SEQ ID NO: 406182 - DNA, 20 bp, Artificial Sequence
  Description of Artificial Sequence: Synthetic oligonucleotide
  Target: LAMA2; (+) strand; PAM type: YTN; PAM sequence: TTA
aattagactgggaacttcta

SEQ ID NO: 406183 - DNA, 20 bp, Artificial Sequence
  Description of Artificial Sequence: Synthetic oligonucleotide
  Target: LAMA2; (+) strand; PAM type: YTN; PAM sequence: TTA
gactgggaacttctaccttc

SEQ ID NO: 406184 - DNA, 20 bp, Artificial Sequence
  Description of Artificial Sequence: Synthetic oligonucleotide
  Target: LAMA2; (+) strand; PAM type: YTN; PAM sequence: CTG
ggaacttctaccttctgccc

SEQ ID NO: 406185 - DNA, 20 bp, Artificial Sequence
  Description of Artificial Sequence: Synthetic oligonucleotide
  Target: LAMA2; (+) strand; PAM type: YTN; PAM sequence: CTT
ctaccttctgcccatggttg

SEQ ID NO: 406186 - DNA, 20 bp, Artificial Sequence
  Description of Artificial Sequence: Synthetic oligonucleotide
  Target: LAMA2; (+) strand; PAM type: YTN; PAM sequence: TTC
taccttctgcccatggttgt

SEQ ID NO: 406187 - DNA, 20 bp, Artificial Sequence
  Description of Artificial Sequence: Synthetic oligonucleotide
  Target: LAMA2; (+) strand; PAM type: YTN; PAM sequence: CTA
ccttctgcccatggttgtta

SEQ ID NO: 406188 - DNA, 20 bp, Artificial Sequence
  Description of Artificial Sequence: Synthetic oligonucleotide
  Target: LAMA2; (+) strand; PAM type: YTN; PAM sequence: CTT
ctgcccatggttgttaccca

SEQ ID NO: 406189 - DNA, 20 bp, Artificial Sequence
  Description of Artificial Sequence: Synthetic oligonucleotide
  Target: LAMA2; (+) strand; PAM type: YTN; PAM sequence: TTC
tgcccatggttgttacccat

SEQ ID NO: 406190 - DNA, 20 bp, Artificial Sequence
  Description of Artificial Sequence: Synthetic oligonucleotide
  Target: LAMA2; (+) strand; PAM type: YTN; PAM sequence: CTG
cccatggttgttacccattc

SEQ ID NO: 406191 - DNA, 20 bp, Artificial Sequence
  Description of Artificial Sequence: Synthetic oligonucleotide
  Target: LAMA2; (+) strand; PAM type: YTN; PAM sequence: TTG
ttacccattctctattatct

SEQ ID NO: 406192 - DNA, 20 bp, Artificial Sequence
  Description of Artificial Sequence: Synthetic oligonucleotide
  Target: LAMA2; (+) strand; PAM type: YTN; PAM sequence: TTA
cccattctctattatctctg

SEQ ID NO: 406193 - DNA, 20 bp, Artificial Sequence
  Description of Artificial Sequence: Synthetic oligonucleotide
  Target: LAMA2; (+) strand; PAM type: YTN; PAM sequence: TTC
tctattatctctggtgtctc

SEQ ID NO: 406194 - DNA, 20 bp, Artificial Sequence
  Description of Artificial Sequence: Synthetic oligonucleotide
  Target: LAMA2; (+) strand; PAM type: YTN; PAM sequence: CTC
tattatctctggtgtctcac

SEQ ID NO: 406195 - DNA, 20 bp, Artificial Sequence
  Description of Artificial Sequence: Synthetic oligonucleotide
  Target: LAMA2; (+) strand; PAM type: YTN; PAM sequence: CTA
ttatctctggtgtctcacca

SEQ ID NO: 406196 - DNA, 20 bp, Artificial Sequence
  Description of Artificial Sequence: Synthetic oligonucleotide
  Target: LAMA2; (+) strand; PAM type: YTN; PAM sequence: TTA
tctctggtgtctcaccacaa

SEQ ID NO: 406197 - DNA, 20 bp, Artificial Sequence
  Description of Artificial Sequence: Synthetic oligonucleotide
  Target: LAMA2; (+) strand; PAM type: YTN; PAM sequence: CTC
tggtgtctcaccacaaattt

SEQ ID NO: 406198 - DNA, 20 bp, Artificial Sequence
  Description of Artificial Sequence: Synthetic oligonucleotide
  Target: LAMA2; (+) strand; PAM type: YTN; PAM sequence: CTG
gtgtctcaccacaaatttct

SEQ ID NO: 406199 - DNA, 20 bp, Artificial Sequence
  Description of Artificial Sequence: Synthetic oligonucleotide
  Target: LAMA2; (+) strand; PAM type: YTN; PAM sequence: CTC
accacaaatttctcaagtta

SEQ ID NO: 406200 - DNA, 20 bp, Artificial Sequence
  Description of Artificial Sequence: Synthetic oligonucleotide
  Target: LAMA2; (+) strand; PAM type: YTN; PAM sequence: TTT
ctcaagttaaacaggtgaaa

SEQ ID NO: 406201 - DNA, 20 bp, Artificial Sequence
  Description of Artificial Sequence: Synthetic oligonucleotide
  Target: LAMA2; (+) strand; PAM type: YTN; PAM sequence: TTC
tcaagttaaacaggtgaaat

SEQ ID NO: 406202 - DNA, 20 bp, Artificial Sequence
  Description of Artificial Sequence: Synthetic oligonucleotide
  Target: LAMA2; (+) strand; PAM type: YTN; PAM sequence: CTC
aagttaaacaggtgaaattt

SEQ ID NO: 406203 - DNA, 20 bp, Artificial Sequence
  Description of Artificial Sequence: Synthetic oligonucleotide
  Target: LAMA2; (+) strand; PAM type: YTN; PAM sequence: TTA
aacaggtgaaattttttatt

SEQ ID NO: 406204 - DNA, 20 bp, Artificial Sequence
  Description of Artificial Sequence: Synthetic oligonucleotide
  Target: LAMA2; (+) strand; PAM type: YTN; PAM sequence: TTT
tttattataataaaactata

SEQ ID NO: 406205 - DNA, 20 bp, Artificial Sequence
  Description of Artificial Sequence: Synthetic oligonucleotide
  Target: LAMA2; (+) strand; PAM type: YTN; PAM sequence: TTT
ttattataataaaactatag

SEQ ID NO: 406206 - DNA, 20 bp, Artificial Sequence
  Description of Artificial Sequence: Synthetic oligonucleotide
  Target: LAMA2; (+) strand; PAM type: YTN; PAM sequence: TTT
tattataataaaactatagc

SEQ ID NO: 406207 - DNA, 20 bp, Artificial Sequence
  Description of Artificial Sequence: Synthetic oligonucleotide
  Target: LAMA2; (+) strand; PAM type: YTN; PAM sequence: TTT
attataataaaactatagct

SEQ ID NO: 406208 - DNA, 20 bp, Artificial Sequence
  Description of Artificial Sequence: Synthetic oligonucleotide
  Target: LAMA2; (+) strand; PAM type: YTN; PAM sequence: TTA
ttataataaaactatagctg

SEQ ID NO: 406209 - DNA, 20 bp, Artificial Sequence
  Description of Artificial Sequence: Synthetic oligonucleotide
  Target: LAMA2; (+) strand; PAM type: YTN; PAM sequence: TTA
taataaaactatagctgttc

SEQ ID NO: 406210 - DNA, 20 bp, Artificial Sequence
  Description of Artificial Sequence: Synthetic oligonucleotide
  Target: LAMA2; (+) strand; PAM type: YTN; PAM sequence: CTA
tagctgttctgtttttccac

SEQ ID NO: 406211 - DNA, 20 bp, Artificial Sequence
  Description of Artificial Sequence: Synthetic oligonucleotide
  Target: LAMA2; (+) strand; PAM type: YTN; PAM sequence: CTG
ttctgtttttccacatgtct

SEQ ID NO: 406212 - DNA, 20 bp, Artificial Sequence
  Description of Artificial Sequence: Synthetic oligonucleotide
  Target: LAMA2; (+) strand; PAM type: YTN; PAM sequence: TTC
tgtttttccacatgtcttct

SEQ ID NO: 406213 - DNA, 20 bp, Artificial Sequence
  Description of Artificial Sequence: Synthetic oligonucleotide
  Target: LAMA2; (+) strand; PAM type: YTN; PAM sequence: CTG
tttttccacatgtcttctca

SEQ ID NO: 406214 - DNA, 20 bp, Artificial Sequence
  Description of Artificial Sequence: Synthetic oligonucleotide
  Target: LAMA2; (+) strand; PAM type: YTN; PAM sequence: TTT
ttccacatgtcttctcatat

SEQ ID NO: 406215 - DNA, 20 bp, Artificial Sequence
  Description of Artificial Sequence: Synthetic oligonucleotide
  Target: LAMA2; (+) strand; PAM type: YTN; PAM sequence: TTT
tccacatgtcttctcatata

SEQ ID NO: 406216 - DNA, 20 bp, Artificial Sequence
  Description of Artificial Sequence: Synthetic oligonucleotide
  Target: LAMA2; (+) strand; PAM type: YTN; PAM sequence: TTT
ccacatgtcttctcatatat

SEQ ID NO: 406217 - DNA, 20 bp, Artificial Sequence
  Description of Artificial Sequence: Synthetic oligonucleotide
  Target: LAMA2; (+) strand; PAM type: YTN; PAM sequence: TTC
cacatgtcttctcatatatc

SEQ ID NO: 406218 - DNA, 20 bp, Artificial Sequence
  Description of Artificial Sequence: Synthetic oligonucleotide
  Target: LAMA2; (+) strand; PAM type: YTN; PAM sequence: CTT
ctcatatatccaatatattt

SEQ ID NO: 406219 - DNA, 20 bp, Artificial Sequence
  Description of Artificial Sequence: Synthetic oligonucleotide
  Target: LAMA2; (+) strand; PAM type: YTN; PAM sequence: TTC
tcatatatccaatatatttt

SEQ ID NO: 406220 - DNA, 20 bp, Artificial Sequence
  Description of Artificial Sequence: Synthetic oligonucleotide
  Target: LAMA2; (+) strand; PAM type: YTN; PAM sequence: CTC
atatatccaatatattttct

SEQ ID NO: 406221 - DNA, 20 bp, Artificial Sequence
  Description of Artificial Sequence: Synthetic oligonucleotide
  Target: LAMA2; (+) strand; PAM type: YTN; PAM sequence: TTT
tctctaatacttttaaagta

SEQ ID NO: 406222 - DNA, 20 bp, Artificial Sequence
  Description of Artificial Sequence: Synthetic oligonucleotide
  Target: LAMA2; (+) strand; PAM type: YTN; PAM sequence: TTT
ctctaatacttttaaagtat

SEQ ID NO: 406223 - DNA, 20 bp, Artificial Sequence
  Description of Artificial Sequence: Synthetic oligonucleotide
  Target: LAMA2; (+) strand; PAM type: YTN; PAM sequence: TTC
tctaatacttttaaagtatt

SEQ ID NO: 406224 - DNA, 20 bp, Artificial Sequence
  Description of Artificial Sequence: Synthetic oligonucleotide
  Target: LAMA2; (+) strand; PAM type: YTN; PAM sequence: CTC
taatacttttaaagtatttt

SEQ ID NO: 406225 - DNA, 20 bp, Artificial Sequence
  Description of Artificial Sequence: Synthetic oligonucleotide
  Target: LAMA2; (+) strand; PAM type: YTN; PAM sequence: CTA
atacttttaaagtattttat

SEQ ID NO: 406226 - DNA, 20 bp, Artificial Sequence
  Description of Artificial Sequence: Synthetic oligonucleotide
  Target: LAMA2; (+) strand; PAM type: YTN; PAM sequence: CTT
ttaaagtattttattactat

SEQ ID NO: 406227 - DNA, 20 bp, Artificial Sequence
  Description of Artificial Sequence: Synthetic oligonucleotide
  Target: LAMA2; (+) strand; PAM type: YTN; PAM sequence: TTT
taaagtattttattactata

SEQ ID NO: 406228 - DNA, 20 bp, Artificial Sequence
  Description of Artificial Sequence: Synthetic oligonucleotide
  Target: LAMA2; (+) strand; PAM type: YTN; PAM sequence: TTT
aaagtattttattactatag

SEQ ID NO: 406229 - DNA, 20 bp, Artificial Sequence
  Description of Artificial Sequence: Synthetic oligonucleotide
  Target: LAMA2; (+) strand; PAM type: YTN; PAM sequence: TTA
aagtattttattactatagc

SEQ ID NO: 406230 - DNA, 20 bp, Artificial Sequence
  Description of Artificial Sequence: Synthetic oligonucleotide
  Target: LAMA2; (+) strand; PAM type: YTN; PAM sequence: TTT
tattactatagcaggtcagt

SEQ ID NO: 406231 - DNA, 20 bp, Artificial Sequence
  Description of Artificial Sequence: Synthetic oligonucleotide
  Target: LAMA2; (+) strand; PAM type: YTN; PAM sequence: TTT
attactatagcaggtcagtt

SEQ ID NO: 406232 - DNA, 20 bp, Artificial Sequence
  Description of Artificial Sequence: Synthetic oligonucleotide
  Target: LAMA2; (+) strand; PAM type: YTN; PAM sequence: TTA
ttactatagcaggtcagtta

SEQ ID NO: 406233 - DNA, 20 bp, Artificial Sequence
  Description of Artificial Sequence: Synthetic oligonucleotide
  Target: LAMA2; (+) strand; PAM type: YTN; PAM sequence: TTA
ctatagcaggtcagttaata

SEQ ID NO: 406234 - DNA, 20 bp, Artificial Sequence
  Description of Artificial Sequence: Synthetic oligonucleotide
  Target: LAMA2; (+) strand; PAM type: YTN; PAM sequence: CTA
tagcaggtcagttaatatgt

SEQ ID NO: 406235 - DNA, 20 bp, Artificial Sequence
  Description of Artificial Sequence: Synthetic oligonucleotide
  Target: LAMA2; (+) strand; PAM type: YTN; PAM sequence: TTA
atatgtattaatttttcctt

SEQ ID NO: 406236 - DNA, 20 bp, Artificial Sequence
  Description of Artificial Sequence: Synthetic oligonucleotide
  Target: LAMA2; (+) strand; PAM type: YTN; PAM sequence: TTA
atttttccttataaaaagaa

SEQ ID NO: 406237 - DNA, 20 bp, Artificial Sequence
  Description of Artificial Sequence: Synthetic oligonucleotide
  Target: LAMA2; (+) strand; PAM type: YTN; PAM sequence: TTT
ttccttataaaaagaaaagc

SEQ ID NO: 406238 - DNA, 20 bp, Artificial Sequence
  Description of Artificial Sequence: Synthetic oligonucleotide
  Target: LAMA2; (+) strand; PAM type: YTN; PAM sequence: TTT
tccttataaaaagaaaagca

SEQ ID NO: 406239 - DNA, 20 bp, Artificial Sequence
  Description of Artificial Sequence: Synthetic oligonucleotide
  Target: LAMA2; (+) strand; PAM type: YTN; PAM sequence: TTT
ccttataaaaagaaaagcat

SEQ ID NO: 406240 - DNA, 20 bp, Artificial Sequence
  Description of Artificial Sequence: Synthetic oligonucleotide
  Target: LAMA2; (+) strand; PAM type: YTN; PAM sequence: TTC
cttataaaaagaaaagcatc

SEQ ID NO: 406241 - DNA, 20 bp, Artificial Sequence
  Description of Artificial Sequence: Synthetic oligonucleotide
  Target: LAMA2; (+) strand; PAM type: YTN; PAM sequence: CTT
ataaaaagaaaagcatcgaa

SEQ ID NO: 406242 - DNA, 20 bp, Artificial Sequence
  Description of Artificial Sequence: Synthetic oligonucleotide
  Target: LAMA2; (+) strand; PAM type: YTN; PAM sequence: TTA
taaaaagaaaagcatcgaag

SEQ ID NO: 406243 - DNA, 20 bp, Artificial Sequence
  Description of Artificial Sequence: Synthetic oligonucleotide
  Target: LAMA2; (+) strand; PAM type: YTN; PAM sequence: CTG
caatggaaaaagcaaatgtt

SEQ ID NO: 406244 - DNA, 20 bp, Artificial Sequence
  Description of Artificial Sequence: Synthetic oligonucleotide
  Target: LAMA2; (+) strand; PAM type: YTN; PAM sequence: TTA
taaacaaataattcacaaaa

SEQ ID NO: 406245 - DNA, 20 bp, Artificial Sequence
  Description of Artificial Sequence: Synthetic oligonucleotide
  Target: LAMA2; (+) strand; PAM type: YTN; PAM sequence: TTC
acaaaagaaaaatgcaaact

SEQ ID NO: 406246 - DNA, 20 bp, Artificial Sequence
  Description of Artificial Sequence: Synthetic oligonucleotide
  Target: LAMA2; (+) strand; PAM type: YTN; PAM sequence: CTT
cttacataaagttgaaaaat

SEQ ID NO: 406247 - DNA, 20 bp, Artificial Sequence
  Description of Artificial Sequence: Synthetic oligonucleotide
  Target: LAMA2; (+) strand; PAM type: YTN; PAM sequence: TTC
ttacataaagttgaaaaatg

SEQ ID NO: 406248 - DNA, 20 bp, Artificial Sequence
  Description of Artificial Sequence: Synthetic oligonucleotide
  Target: LAMA2; (+) strand; PAM type: YTN; PAM sequence: CTT
acataaagttgaaaaatgca

SEQ ID NO: 406249 - DNA, 20 bp, Artificial Sequence
  Description of Artificial Sequence: Synthetic oligonucleotide
  Target: LAMA2; (+) strand; PAM type: YTN; PAM sequence: TTA
cataaagttgaaaaatgcaa

SEQ ID NO: 406250 - DNA, 20 bp, Artificial Sequence
  Description of Artificial Sequence: Synthetic oligonucleotide
  Target: LAMA2; (+) strand; PAM type: YTN; PAM sequence: TTG
aaaaatgcaatctcaataga

SEQ ID NO: 406251 - DNA, 20 bp, Artificial Sequence
  Description of Artificial Sequence: Synthetic oligonucleotide
  Target: LAMA2; (+) strand; PAM type: YTN; PAM sequence: CTC
aatagatgacaagcatatgg

SEQ ID NO: 406252 - DNA, 20 bp, Artificial Sequence
  Description of Artificial Sequence: Synthetic oligonucleotide
  Target: LAMA2; (+) strand; PAM type: YTN; PAM sequence: TTG
acttgcagtagcaatatcca

SEQ ID NO: 406253 - DNA, 20 bp, Artificial Sequence
  Description of Artificial Sequence: Synthetic oligonucleotide
  Target: LAMA2; (+) strand; PAM type: YTN; PAM sequence: CTT
gcagtagcaatatccaaaga

SEQ ID NO: 406254 - DNA, 20 bp, Artificial Sequence
  Description of Artificial Sequence: Synthetic oligonucleotide
  Target: LAMA2; (+) strand; PAM type: YTN; PAM sequence: TTG
cagtagcaatatccaaagat

SEQ ID NO: 406255 - DNA, 20 bp, Artificial Sequence
  Description of Artificial Sequence: Synthetic oligonucleotide
  Target: LAMA2; (+) strand; PAM type: YTN; PAM sequence: CTT
aaagcagtaaaatctaaatt

SEQ ID NO: 406256 - DNA, 20 bp, Artificial Sequence
  Description of Artificial Sequence: Synthetic oligonucleotide
  Target: LAMA2; (+) strand; PAM type: YTN; PAM sequence: TTA
aagcagtaaaatctaaattt

SEQ ID NO: 406257 - DNA, 20 bp, Artificial Sequence
  Description of Artificial Sequence: Synthetic oligonucleotide
  Target: LAMA2; (+) strand; PAM type: YTN; PAM sequence: CTA
aatttaaaaggaaaagaaga

SEQ ID NO: 406258 - DNA, 20 bp, Artificial Sequence
  Description of Artificial Sequence: Synthetic oligonucleotide
  Target: LAMA2; (+) strand; PAM type: YTN; PAM sequence: TTT
aaaaggaaaagaagaaaggc

SEQ ID NO: 406259 - DNA, 20 bp, Artificial Sequence
  Description of Artificial Sequence: Synthetic oligonucleotide
  Target: LAMA2; (+) strand; PAM type: YTN; PAM sequence: TTA
aaaggaaaagaagaaaggct

SEQ ID NO: 406260 - DNA, 20 bp, Artificial Sequence
  Description of Artificial Sequence: Synthetic oligonucleotide
  Target: LAMA2; (+) strand; PAM type: YTN; PAM sequence: CTT
ggcaaaataaccttactacc

SEQ ID NO: 406261 - DNA, 20 bp, Artificial Sequence
  Description of Artificial Sequence: Synthetic oligonucleotide
  Target: LAMA2; (+) strand; PAM type: YTN; PAM sequence: TTG
gcaaaataaccttactacct

SEQ ID NO: 406262 - DNA, 20 bp, Artificial Sequence
  Description of Artificial Sequence: Synthetic oligonucleotide
  Target: LAMA2; (+) strand; PAM type: YTN; PAM sequence: CTT
actacctgctttgataagat

SEQ ID NO: 406263 - DNA, 20 bp, Artificial Sequence
  Description of Artificial Sequence: Synthetic oligonucleotide
  Target: LAMA2; (+) strand; PAM type: YTN; PAM sequence: TTA
ctacctgctttgataagatt

SEQ ID NO: 406264 - DNA, 20 bp, Artificial Sequence
  Description of Artificial Sequence: Synthetic oligonucleotide
  Target: LAMA2; (+) strand; PAM type: YTN; PAM sequence: CTA
cctgctttgataagattagc

SEQ ID NO: 406265 - DNA, 20 bp, Artificial Sequence
  Description of Artificial Sequence: Synthetic oligonucleotide
  Target: LAMA2; (+) strand; PAM type: YTN; PAM sequence: CTG
ctttgataagattagctctt

SEQ ID NO: 406266 - DNA, 20 bp, Artificial Sequence
  Description of Artificial Sequence: Synthetic oligonucleotide
  Target: LAMA2; (+) strand; PAM type: YTN; PAM sequence: CTT
tgataagattagctcttaca

SEQ ID NO: 406267 - DNA, 20 bp, Artificial Sequence
  Description of Artificial Sequence: Synthetic oligonucleotide
  Target: LAMA2; (+) strand; PAM type: YTN; PAM sequence: TTT
gataagattagctcttacag

SEQ ID NO: 406268 - DNA, 20 bp, Artificial Sequence
  Description of Artificial Sequence: Synthetic oligonucleotide
  Target: LAMA2; (+) strand; PAM type: YTN; PAM sequence: TTG
ataagattagctcttacagg

SEQ ID NO: 406269 - DNA, 20 bp, Artificial Sequence
  Description of Artificial Sequence: Synthetic oligonucleotide
  Target: LAMA2; (+) strand; PAM type: YTN; PAM sequence: TTA
gctcttacaggacacattta

SEQ ID NO: 406270 - DNA, 20 bp, Artificial Sequence
  Description of Artificial Sequence: Synthetic oligonucleotide
  Target: LAMA2; (+) strand; PAM type: YTN; PAM sequence: CTC
ttacaggacacatttattaa

SEQ ID NO: 406271 - DNA, 20 bp, Artificial Sequence
  Description of Artificial Sequence: Synthetic oligonucleotide
  Target: LAMA2; (+) strand; PAM type: YTN; PAM sequence: CTT
acaggacacatttattaaat

SEQ ID NO: 406272 - DNA, 20 bp, Artificial Sequence
  Description of Artificial Sequence: Synthetic oligonucleotide
  Target: LAMA2; (+) strand; PAM type: YTN; PAM sequence: TTA
caggacacatttattaaata

SEQ ID NO: 406273 - DNA, 20 bp, Artificial Sequence
  Description of Artificial Sequence: Synthetic oligonucleotide
  Target: LAMA2; (+) strand; PAM type: YTN; PAM sequence: TTT
attaaataccaactatgcat

SEQ ID NO: 406274 - DNA, 20 bp, Artificial Sequence
  Description of Artificial Sequence: Synthetic oligonucleotide
  Target: LAMA2; (+) strand; PAM type: YTN; PAM sequence: TTA
ttaaataccaactatgcatc

SEQ ID NO: 406275 - DNA, 20 bp, Artificial Sequence
  Description of Artificial Sequence: Synthetic oligonucleotide
  Target: LAMA2; (+) strand; PAM type: YTN; PAM sequence: TTA
aataccaactatgcatcaga

SEQ ID NO: 406276 - DNA, 20 bp, Artificial Sequence
  Description of Artificial Sequence: Synthetic oligonucleotide
  Target: LAMA2; (+) strand; PAM type: YTN; PAM sequence: CTA
tgcatcagatgctgtgctgc

SEQ ID NO: 406277 - DNA, 20 bp, Artificial Sequence
  Description of Artificial Sequence: Synthetic oligonucleotide
  Target: LAMA2; (+) strand; PAM type: YTN; PAM sequence: CTG
tgctgcatcagtgaagatgc

SEQ ID NO: 406278 - DNA, 20 bp, Artificial Sequence
  Description of Artificial Sequence: Synthetic oligonucleotide
  Target: LAMA2; (+) strand; PAM type: YTN; PAM sequence: CTG
catcagtgaagatgcatacg

SEQ ID NO: 406279 - DNA, 20 bp, Artificial Sequence
  Description of Artificial Sequence: Synthetic oligonucleotide
  Target: LAMA2; (+) strand; PAM type: YTN; PAM sequence: TTC
ctacccttgagtaacttacc

SEQ ID NO: 406280 - DNA, 20 bp, Artificial Sequence
  Description of Artificial Sequence: Synthetic oligonucleotide
  Target: LAMA2; (+) strand; PAM type: YTN; PAM sequence: CTA
cccttgagtaacttacctgc

SEQ ID NO: 406281 - DNA, 20 bp, Artificial Sequence
  Description of Artificial Sequence: Synthetic oligonucleotide
  Target: LAMA2; (+) strand; PAM type: YTN; PAM sequence: CTT
gagtaacttacctgctgcac

SEQ ID NO: 406282 - DNA, 20 bp, Artificial Sequence
  Description of Artificial Sequence: Synthetic oligonucleotide
  Target: LAMA2; (+) strand; PAM type: YTN; PAM sequence: TTG
agtaacttacctgctgcaca

SEQ ID NO: 406283 - DNA, 20 bp, Artificial Sequence
  Description of Artificial Sequence: Synthetic oligonucleotide
  Target: LAMA2; (+) strand; PAM type: YTN; PAM sequence: CTT
acctgctgcacaagtagcaa

SEQ ID NO: 406284 - DNA, 20 bp, Artificial Sequence
  Description of Artificial Sequence: Synthetic oligonucleotide
  Target: LAMA2; (+) strand; PAM type: YTN; PAM sequence: TTA
cctgctgcacaagtagcaaa

SEQ ID NO: 406285 - DNA, 20 bp, Artificial Sequence
  Description of Artificial Sequence: Synthetic oligonucleotide
  Target: LAMA2; (+) strand; PAM type: YTN; PAM sequence: CTG
ctgcacaagtagcaaattac

SEQ ID NO: 406286 - DNA, 20 bp, Artificial Sequence
  Description of Artificial Sequence: Synthetic oligonucleotide
  Target: LAMA2; (+) strand; PAM type: YTN; PAM sequence: CTG
cacaagtagcaaattactgt

SEQ ID NO: 406287 - DNA, 20 bp, Artificial Sequence
  Description of Artificial Sequence: Synthetic oligonucleotide
  Target: LAMA2; (+) strand; PAM type: YTN; PAM sequence: TTA
ctgtatctgtttaggataca

SEQ ID NO: 406288 - DNA, 20 bp, Artificial Sequence
  Description of Artificial Sequence: Synthetic oligonucleotide
  Target: LAMA2; (+) strand; PAM type: YTN; PAM sequence: CTG
tatctgtttaggatacagta

SEQ ID NO: 406289 - DNA, 20 bp, Artificial Sequence
  Description of Artificial Sequence: Synthetic oligonucleotide
  Target: LAMA2; (+) strand; PAM type: YTN; PAM sequence: CTG
tttaggatacagtaaacacc

SEQ ID NO: 406290 - DNA, 20 bp, Artificial Sequence
  Description of Artificial Sequence: Synthetic oligonucleotide
  Target: LAMA2; (+) strand; PAM type: YTN; PAM sequence: TTT
aggatacagtaaacaccaag

SEQ ID NO: 406291 - DNA, 20 bp, Artificial Sequence
  Description of Artificial Sequence: Synthetic oligonucleotide
  Target: LAMA2; (+) strand; PAM type: YTN; PAM sequence: TTA
ggatacagtaaacaccaagg

SEQ ID NO: 406292 - DNA, 20 bp, Artificial Sequence
  Description of Artificial Sequence: Synthetic oligonucleotide
  Target: LAMA2; (+) strand; PAM type: YTN; PAM sequence: CTA
actgagccctaagtcctttt

SEQ ID NO: 406293 - DNA, 20 bp, Artificial Sequence
  Description of Artificial Sequence: Synthetic oligonucleotide
  Target: LAMA2; (+) strand; PAM type: YTN; PAM sequence: CTG
agccctaagtccttttttag

SEQ ID NO: 406294 - DNA, 20 bp, Artificial Sequence
  Description of Artificial Sequence: Synthetic oligonucleotide
  Target: LAMA2; (+) strand; PAM type: YTN; PAM sequence: CTA
agtccttttttagttgaggg

SEQ ID NO: 406295 - DNA, 20 bp, Artificial Sequence
  Description of Artificial Sequence: Synthetic oligonucleotide
  Target: LAMA2; (+) strand; PAM type: YTN; PAM sequence: CTT
ttttagttgagggggtagga

SEQ ID NO: 406296 - DNA, 20 bp, Artificial Sequence
  Description of Artificial Sequence: Synthetic oligonucleotide
  Target: LAMA2; (+) strand; PAM type: YTN; PAM sequence: TTT
tttagttgagggggtaggag

SEQ ID NO: 406297 - DNA, 20 bp, Artificial Sequence
  Description of Artificial Sequence: Synthetic oligonucleotide
  Target: LAMA2; (+) strand; PAM type: YTN; PAM sequence: TTT
ttagttgagggggtaggagg

SEQ ID NO: 406298 - DNA, 20 bp, Artificial Sequence
  Description of Artificial Sequence: Synthetic oligonucleotide
  Target: LAMA2; (+) strand; PAM type: YTN; PAM sequence: TTT
tagttgagggggtaggaggg

SEQ ID NO: 406299 - DNA, 20 bp, Artificial Sequence
  Description of Artificial Sequence: Synthetic oligonucleotide
  Target: LAMA2; (+) strand; PAM type: YTN; PAM sequence: TTT
agttgagggggtaggagggg

SEQ ID NO: 406300 - DNA, 20 bp, Artificial Sequence
  Description of Artificial Sequence: Synthetic oligonucleotide
  Target: LAMA2; (+) strand; PAM type: YTN; PAM sequence: TTA
gttgagggggtaggaggggt

SEQ ID NO: 406301 - DNA, 20 bp, Artificial Sequence
  Description of Artificial Sequence: Synthetic oligonucleotide
  Target: LAMA2; (+) strand; PAM type: YTN; PAM sequence: TTG
agggggtaggaggggtggaa

SEQ ID NO: 406302 - DNA, 20 bp, Artificial Sequence
  Description of Artificial Sequence: Synthetic oligonucleotide
  Target: LAMA2; (+) strand; PAM type: YTN; PAM sequence: TTG
caggcgatccaggccaaaaa

SEQ ID NO: 406303 - DNA, 20 bp, Artificial Sequence
  Description of Artificial Sequence: Synthetic oligonucleotide
  Target: LAMA2; (+) strand; PAM type: YTN; PAM sequence: TTA
tttgggcagctgttgtaatc

SEQ ID NO: 406304 - DNA, 20 bp, Artificial Sequence
  Description of Artificial Sequence: Synthetic oligonucleotide
  Target: LAMA2; (+) strand; PAM type: YTN; PAM sequence: TTT
gggcagctgttgtaatcagt

SEQ ID NO: 406305 - DNA, 20 bp, Artificial Sequence
  Description of Artificial Sequence: Synthetic oligonucleotide
  Target: LAMA2; (+) strand; PAM type: YTN; PAM sequence: TTG
ggcagctgttgtaatcagtt

SEQ ID NO: 406306 - DNA, 20 bp, Artificial Sequence
  Description of Artificial Sequence: Synthetic oligonucleotide
  Target: LAMA2; (+) strand; PAM type: YTN; PAM sequence: CTG
ttgtaatcagtttgaattat

SEQ ID NO: 406307 - DNA, 20 bp, Artificial Sequence
  Description of Artificial Sequence: Synthetic oligonucleotide
  Target: LAMA2; (+) strand; PAM type: YTN; PAM sequence: TTG
taatcagtttgaattattgg

SEQ ID NO: 406308 - DNA, 20 bp, Artificial Sequence
  Description of Artificial Sequence: Synthetic oligonucleotide
  Target: LAMA2; (+) strand; PAM type: YTN; PAM sequence: TTT
gaattattggagtttaaatt

SEQ ID NO: 406309 - DNA, 20 bp, Artificial Sequence
  Description of Artificial Sequence: Synthetic oligonucleotide
  Target: LAMA2; (+) strand; PAM type: YTN; PAM sequence: TTG
aattattggagtttaaattt

SEQ ID NO: 406310 - DNA, 20 bp, Artificial Sequence
  Description of Artificial Sequence: Synthetic oligonucleotide
  Target: LAMA2; (+) strand; PAM type: YTN; PAM sequence: TTA
ttggagtttaaatttcaaaa

SEQ ID NO: 406311 - DNA, 20 bp, Artificial Sequence
  Description of Artificial Sequence: Synthetic oligonucleotide
  Target: LAMA2; (+) strand; PAM type: YTN; PAM sequence: TTG
gagtttaaatttcaaaagag

SEQ ID NO: 406312 - DNA, 20 bp, Artificial Sequence
  Description of Artificial Sequence: Synthetic oligonucleotide
  Target: LAMA2; (+) strand; PAM type: YTN; PAM sequence: TTT
aaatttcaaaagagtgatag

SEQ ID NO: 406313 - DNA, 20 bp, Artificial Sequence
  Description of Artificial Sequence: Synthetic oligonucleotide
  Target: LAMA2; (+) strand; PAM type: YTN; PAM sequence: TTA
aatttcaaaagagtgataga

SEQ ID NO: 406314 - DNA, 20 bp, Artificial Sequence
  Description of Artificial Sequence: Synthetic oligonucleotide
  Target: LAMA2; (+) strand; PAM type: YTN; PAM sequence: TTT
caaaagagtgatagaagata

SEQ ID NO: 406315 - DNA, 20 bp, Artificial Sequence
  Description of Artificial Sequence: Synthetic oligonucleotide
  Target: LAMA2; (+) strand; PAM type: YTN; PAM sequence: TTC
aaaagagtgatagaagataa

SEQ ID NO: 406316 - DNA, 20 bp, Artificial Sequence
  Description of Artificial Sequence: Synthetic oligonucleotide
  Target: LAMA2; (+) strand; PAM type: YTN; PAM sequence: CTG
ggcatgttggcaagggccag

SEQ ID NO: 406317 - DNA, 20 bp, Artificial Sequence
  Description of Artificial Sequence: Synthetic oligonucleotide
  Target: LAMA2; (+) strand; PAM type: YTN; PAM sequence: TTG
gcaagggccagatcacagga

SEQ ID NO: 406318 - DNA, 20 bp, Artificial Sequence
  Description of Artificial Sequence: Synthetic oligonucleotide
  Target: LAMA2; (+) strand; PAM type: YTN; PAM sequence: CTG
tttaaactgtgttgaggagt

SEQ ID NO: 406319 - DNA, 20 bp, Artificial Sequence
  Description of Artificial Sequence: Synthetic oligonucleotide
  Target: LAMA2; (+) strand; PAM type: YTN; PAM sequence: TTT
aaactgtgttgaggagtttg

SEQ ID NO: 406320 - DNA, 20 bp, Artificial Sequence
  Description of Artificial Sequence: Synthetic oligonucleotide
  Target: LAMA2; (+) strand; PAM type: YTN; PAM sequence: TTA
aactgtgttgaggagtttgc

SEQ ID NO: 406321 - DNA, 20 bp, Artificial Sequence
  Description of Artificial Sequence: Synthetic oligonucleotide
  Target: LAMA2; (+) strand; PAM type: YTN; PAM sequence: CTG
tgttgaggagtttgcatttc

SEQ ID NO: 406322 - DNA, 20 bp, Artificial Sequence
  Description of Artificial Sequence: Synthetic oligonucleotide
  Target: LAMA2; (+) strand; PAM type: YTN; PAM sequence: TTG
aggagtttgcatttcatctt

SEQ ID NO: 406323 - DNA, 20 bp, Artificial Sequence
  Description of Artificial Sequence: Synthetic oligonucleotide
  Target: LAMA2; (+) strand; PAM type: YTN; PAM sequence: TTT
gcatttcatcttgatgaact

SEQ ID NO: 406324 - DNA, 20 bp, Artificial Sequence
  Description of Artificial Sequence: Synthetic oligonucleotide
  Target: LAMA2; (+) strand; PAM type: YTN; PAM sequence: TTG
catttcatcttgatgaactt

SEQ ID NO: 406325 - DNA, 20 bp, Artificial Sequence
  Description of Artificial Sequence: Synthetic oligonucleotide
  Target: LAMA2; (+) strand; PAM type: YTN; PAM sequence: TTT
catcttgatgaacttgattt

SEQ ID NO: 406326 - DNA, 20 bp, Artificial Sequence
  Description of Artificial Sequence: Synthetic oligonucleotide
  Target: LAMA2; (+) strand; PAM type: YTN; PAM sequence: TTC
atcttgatgaacttgatttt

SEQ ID NO: 406327 - DNA, 20 bp, Artificial Sequence
  Description of Artificial Sequence: Synthetic oligonucleotide
  Target: LAMA2; (+) strand; PAM type: YTN; PAM sequence: CTT
gatgaacttgattttaagta

SEQ ID NO: 406328 - DNA, 20 bp, Artificial Sequence
  Description of Artificial Sequence: Synthetic oligonucleotide
  Target: LAMA2; (+) strand; PAM type: YTN; PAM sequence: TTG
atgaacttgattttaagtag

SEQ ID NO: 406329 - DNA, 20 bp, Artificial Sequence
  Description of Artificial Sequence: Synthetic oligonucleotide
  Target: LAMA2; (+) strand; PAM type: YTN; PAM sequence: CTT
gattttaagtagagatgtga

SEQ ID NO: 406330 - DNA, 20 bp, Artificial Sequence
  Description of Artificial Sequence: Synthetic oligonucleotide
  Target: LAMA2; (+) strand; PAM type: YTN; PAM sequence: TTG
attttaagtagagatgtgac

SEQ ID NO: 406331 - DNA, 20 bp, Artificial Sequence
  Description of Artificial Sequence: Synthetic oligonucleotide
  Target: LAMA2; (+) strand; PAM type: YTN; PAM sequence: TTT
taagtagagatgtgacaggg

SEQ ID NO: 406332 - DNA, 20 bp, Artificial Sequence
  Description of Artificial Sequence: Synthetic oligonucleotide
  Target: LAMA2; (+) strand; PAM type: YTN; PAM sequence: TTT
aagtagagatgtgacagggt

SEQ ID NO: 406333 - DNA, 20 bp, Artificial Sequence
  Description of Artificial Sequence: Synthetic oligonucleotide
  Target: LAMA2; (+) strand; PAM type: YTN; PAM sequence: TTA
agtagagatgtgacagggta

SEQ ID NO: 406334 - DNA, 20 bp, Artificial Sequence
  Description of Artificial Sequence: Synthetic oligonucleotide
  Target: LAMA2; (+) strand; PAM type: YTN; PAM sequence: TTT
caatttaagtatattactcg

SEQ ID NO: 406335 - DNA, 20 bp, Artificial Sequence
  Description of Artificial Sequence: Synthetic oligonucleotide
  Target: LAMA2; (+) strand; PAM type: YTN; PAM sequence: TTC
aatttaagtatattactcga

SEQ ID NO: 406336 - DNA, 20 bp, Artificial Sequence
  Description of Artificial Sequence: Synthetic oligonucleotide
  Target: LAMA2; (+) strand; PAM type: YTN; PAM sequence: TTT
aagtatattactcgaggtgt

SEQ ID NO: 406337 - DNA, 20 bp, Artificial Sequence
  Description of Artificial Sequence: Synthetic oligonucleotide
  Target: LAMA2; (+) strand; PAM type: YTN; PAM sequence: TTA
agtatattactcgaggtgtc

SEQ ID NO: 406338 - DNA, 20 bp, Artificial Sequence
  Description of Artificial Sequence: Synthetic oligonucleotide
  Target: LAMA2; (+) strand; PAM type: YTN; PAM sequence: TTA
ctcgaggtgtcagtgtggaa

SEQ ID NO: 406339 - DNA, 20 bp, Artificial Sequence
  Description of Artificial Sequence: Synthetic oligonucleotide
  Target: LAMA2; (+) strand; PAM type: YTN; PAM sequence: CTC
gaggtgtcagtgtggaagac

SEQ ID NO: 406340 - DNA, 20 bp, Artificial Sequence
  Description of Artificial Sequence: Synthetic oligonucleotide
  Target: LAMA2; (+) strand; PAM type: YTN; PAM sequence: TTG
tcagaagaccaaactgaaga

SEQ ID NO: 406341 - DNA, 20 bp, Artificial Sequence
  Description of Artificial Sequence: Synthetic oligonucleotide
  Target: LAMA2; (+) strand; PAM type: YTN; PAM sequence: CTG
aagacaaagcgaacaattgg

SEQ ID NO: 406342 - DNA, 20 bp, Artificial Sequence
  Description of Artificial Sequence: Synthetic oligonucleotide
  Target: LAMA2; (+) strand; PAM type: YTN; PAM sequence: TTG
gattcaataatagtctaggc

SEQ ID NO: 406343 - DNA, 20 bp, Artificial Sequence
  Description of Artificial Sequence: Synthetic oligonucleotide
  Target: LAMA2; (+) strand; PAM type: YTN; PAM sequence: TTC
aataatagtctaggcaggag

SEQ ID NO: 406344 - DNA, 20 bp, Artificial Sequence
  Description of Artificial Sequence: Synthetic oligonucleotide
  Target: LAMA2; (+) strand; PAM type: YTN; PAM sequence: CTA
ggcaggaggtaaattatgct

SEQ ID NO: 406345 - DNA, 20 bp, Artificial Sequence
  Description of Artificial Sequence: Synthetic oligonucleotide
  Target: LAMA2; (+) strand; PAM type: YTN; PAM sequence: TTA
tgcttgaagtaagagatgca

SEQ ID NO: 406346 - DNA, 20 bp, Artificial Sequence
  Description of Artificial Sequence: Synthetic oligonucleotide
  Target: LAMA2; (+) strand; PAM type: YTN; PAM sequence: CTT
gaagtaagagatgcagtggg

SEQ ID NO: 406347 - DNA, 20 bp, Artificial Sequence
  Description of Artificial Sequence: Synthetic oligonucleotide
  Target: LAMA2; (+) strand; PAM type: YTN; PAM sequence: TTG
aagtaagagatgcagtggga

SEQ ID NO: 406348 - DNA, 20 bp, Artificial Sequence
  Description of Artificial Sequence: Synthetic oligonucleotide
  Target: LAMA2; (+) strand; PAM type: YTN; PAM sequence: TTG
acatcaaagaaatgcagaat

SEQ ID NO: 406349 - DNA, 20 bp, Artificial Sequence
  Description of Artificial Sequence: Synthetic oligonucleotide
  Target: LAMA2; (+) strand; PAM type: YTN; PAM sequence: TTA
cacagctattagaatgacta

SEQ ID NO: 406350 - DNA, 20 bp, Artificial Sequence
  Description of Artificial Sequence: Synthetic oligonucleotide
  Target: LAMA2; (+) strand; PAM type: YTN; PAM sequence: CTA
ttagaatgactaaaattaaa

SEQ ID NO: 406351 - DNA, 20 bp, Artificial Sequence
  Description of Artificial Sequence: Synthetic oligonucleotide
  Target: LAMA2; (+) strand; PAM type: YTN; PAM sequence: TTA
gaatgactaaaattaaaaag

SEQ ID NO: 406352 - DNA, 20 bp, Artificial Sequence
  Description of Artificial Sequence: Synthetic oligonucleotide
  Target: LAMA2; (+) strand; PAM type: YTN; PAM sequence: CTA
aaattaaaaagactgaccat

SEQ ID NO: 406353 - DNA, 20 bp, Artificial Sequence
  Description of Artificial Sequence: Synthetic oligonucleotide
  Target: LAMA2; (+) strand; PAM type: YTN; PAM sequence: TTA
aaaagactgaccatactcag

SEQ ID NO: 406354 - DNA, 20 bp, Artificial Sequence
  Description of Artificial Sequence: Synthetic oligonucleotide
  Target: LAMA2; (+) strand; PAM type: YTN; PAM sequence: CTG
accatactcagtactggcag

SEQ ID NO: 406355 - DNA, 20 bp, Artificial Sequence
  Description of Artificial Sequence: Synthetic oligonucleotide
  Target: LAMA2; (+) strand; PAM type: YTN; PAM sequence: CTC
agtactggcagaaggtggag

SEQ ID NO: 406356 - DNA, 20 bp, Artificial Sequence
  Description of Artificial Sequence: Synthetic oligonucleotide
  Target: LAMA2; (+) strand; PAM type: YTN; PAM sequence: CTG
gcagaaggtggagacactgg

SEQ ID NO: 406357 - DNA, 20 bp, Artificial Sequence
  Description of Artificial Sequence: Synthetic oligonucleotide
  Target: LAMA2; (+) strand; PAM type: YTN; PAM sequence: CTG
gaactcatacactgctgctg

SEQ ID NO: 406358 - DNA, 20 bp, Artificial Sequence
  Description of Artificial Sequence: Synthetic oligonucleotide
  Target: LAMA2; (+) strand; PAM type: YTN; PAM sequence: CTC
atacactgctgctgaggata

SEQ ID NO: 406359 - DNA, 20 bp, Artificial Sequence
  Description of Artificial Sequence: Synthetic oligonucleotide
  Target: LAMA2; (+) strand; PAM type: YTN; PAM sequence: CTG
ctgctgaggatataaagtgg

SEQ ID NO: 406360 - DNA, 20 bp, Artificial Sequence
  Description of Artificial Sequence: Synthetic oligonucleotide
  Target: LAMA2; (+) strand; PAM type: YTN; PAM sequence: CTG
ctgaggatataaagtggcat

SEQ ID NO: 406361 - DNA, 20 bp, Artificial Sequence
  Description of Artificial Sequence: Synthetic oligonucleotide
  Target: LAMA2; (+) strand; PAM type: YTN; PAM sequence: CTG
aggatataaagtggcataac

SEQ ID NO: 406362 - DNA, 20 bp, Artificial Sequence
  Description of Artificial Sequence: Synthetic oligonucleotide
  Target: LAMA2; (+) strand; PAM type: YTN; PAM sequence: TTG
gaagaggttggccatttctt

SEQ ID NO: 406363 - DNA, 20 bp, Artificial Sequence
  Description of Artificial Sequence: Synthetic oligonucleotide
  Target: LAMA2; (+) strand; PAM type: YTN; PAM sequence: TTG
gccatttcttaaaagactaa

SEQ ID NO: 406364 - DNA, 20 bp, Artificial Sequence
  Description of Artificial Sequence: Synthetic oligonucleotide
  Target: LAMA2; (+) strand; PAM type: YTN; PAM sequence: TTT
cttaaaagactaaatataca

SEQ ID NO: 406365 - DNA, 20 bp, Artificial Sequence
  Description of Artificial Sequence: Synthetic oligonucleotide
  Target: LAMA2; (+) strand; PAM type: YTN; PAM sequence: TTC
ttaaaagactaaatatacat

SEQ ID NO: 406366 - DNA, 20 bp, Artificial Sequence
  Description of Artificial Sequence: Synthetic oligonucleotide
  Target: LAMA2; (+) strand; PAM type: YTN; PAM sequence: CTT
aaaagactaaatatacatct

SEQ ID NO: 406367 - DNA, 20 bp, Artificial Sequence
  Description of Artificial Sequence: Synthetic oligonucleotide
  Target: LAMA2; (+) strand; PAM type: YTN; PAM sequence: TTA
aaagactaaatatacatcta

SEQ ID NO: 406368 - DNA, 20 bp, Artificial Sequence
  Description of Artificial Sequence: Synthetic oligonucleotide
  Target: LAMA2; (+) strand; PAM type: YTN; PAM sequence: CTA
aatatacatctaccatacaa

SEQ ID NO: 406369 - DNA, 20 bp, Artificial Sequence
  Description of Artificial Sequence: Synthetic oligonucleotide
  Target: LAMA2; (+) strand; PAM type: YTN; PAM sequence: CTA
ccatacaaaccaatcatttc

SEQ ID NO: 406370 - DNA, 20 bp, Artificial Sequence
  Description of Artificial Sequence: Synthetic oligonucleotide
  Target: LAMA2; (+) strand; PAM type: YTN; PAM sequence: TTT
cactcctaattattcaccca

SEQ ID NO: 406371 - DNA, 20 bp, Artificial Sequence
  Description of Artificial Sequence: Synthetic oligonucleotide
  Target: LAMA2; (+) strand; PAM type: YTN; PAM sequence: TTC
actcctaattattcacccag

SEQ ID NO: 406372 - DNA, 20 bp, Artificial Sequence
  Description of Artificial Sequence: Synthetic oligonucleotide
  Target: LAMA2; (+) strand; PAM type: YTN; PAM sequence: CTC
ctaattattcacccaggaca

SEQ ID NO: 406373 - DNA, 20 bp, Artificial Sequence
  Description of Artificial Sequence: Synthetic oligonucleotide
  Target: LAMA2; (+) strand; PAM type: YTN; PAM sequence: CTA
attattcacccaggacacaa

SEQ ID NO: 406374 - DNA, 20 bp, Artificial Sequence
  Description of Artificial Sequence: Synthetic oligonucleotide
  Target: LAMA2; (+) strand; PAM type: YTN; PAM sequence: TTA
ttcacccaggacacaagaaa

SEQ ID NO: 406375 - DNA, 20 bp, Artificial Sequence
  Description of Artificial Sequence: Synthetic oligonucleotide
  Target: LAMA2; (+) strand; PAM type: YTN; PAM sequence: TTC
acccaggacacaagaaagca

SEQ ID NO: 406376 - DNA, 20 bp, Artificial Sequence
  Description of Artificial Sequence: Synthetic oligonucleotide
  Target: LAMA2; (+) strand; PAM type: YTN; PAM sequence: TTT
tttatagaaagacttgtacc

SEQ ID NO: 406377 - DNA, 20 bp, Artificial Sequence
  Description of Artificial Sequence: Synthetic oligonucleotide
  Target: LAMA2; (+) strand; PAM type: YTN; PAM sequence: TTT
ttatagaaagacttgtacca

SEQ ID NO: 406378 - DNA, 20 bp, Artificial Sequence
  Description of Artificial Sequence: Synthetic oligonucleotide
  Target: LAMA2; (+) strand; PAM type: YTN; PAM sequence: TTT
tatagaaagacttgtaccaa

SEQ ID NO: 406379 - DNA, 20 bp, Artificial Sequence
  Description of Artificial Sequence: Synthetic oligonucleotide
  Target: LAMA2; (+) strand; PAM type: YTN; PAM sequence: TTT
atagaaagacttgtaccaaa

SEQ ID NO: 406380 - DNA, 20 bp, Artificial Sequence
  Description of Artificial Sequence: Synthetic oligonucleotide
  Target: LAMA2; (+) strand; PAM type: YTN; PAM sequence: TTA
tagaaagacttgtaccaaaa

SEQ ID NO: 406381 - DNA, 20 bp, Artificial Sequence
  Description of Artificial Sequence: Synthetic oligonucleotide
  Target: LAMA2; (+) strand; PAM type: YTN; PAM sequence: CTT
gtaccaaaatgctcacatta

SEQ ID NO: 406382 - DNA, 20 bp, Artificial Sequence
  Description of Artificial Sequence: Synthetic oligonucleotide
  Target: LAMA2; (+) strand; PAM type: YTN; PAM sequence: TTG
taccaaaatgctcacattac

SEQ ID NO: 406383 - DNA, 20 bp, Artificial Sequence
  Description of Artificial Sequence: Synthetic oligonucleotide
  Target: LAMA2; (+) strand; PAM type: YTN; PAM sequence: CTC
acattacttttatctgtgtt

SEQ ID NO: 406384 - DNA, 20 bp, Artificial Sequence
  Description of Artificial Sequence: Synthetic oligonucleotide
  Target: LAMA2; (+) strand; PAM type: YTN; PAM sequence: TTA
cttttatctgtgttactcaa

SEQ ID NO: 406385 - DNA, 20 bp, Artificial Sequence
  Description of Artificial Sequence: Synthetic oligonucleotide
  Target: LAMA2; (+) strand; PAM type: YTN; PAM sequence: CTT
ttatctgtgttactcaaaaa

SEQ ID NO: 406386 - DNA, 20 bp, Artificial Sequence
  Description of Artificial Sequence: Synthetic oligonucleotide
  Target: LAMA2; (+) strand; PAM type: YTN; PAM sequence: TTT
tatctgtgttactcaaaaac

SEQ ID NO: 406387 - DNA, 20 bp, Artificial Sequence
  Description of Artificial Sequence: Synthetic oligonucleotide
  Target: LAMA2; (+) strand; PAM type: YTN; PAM sequence: TTT
atctgtgttactcaaaaact

SEQ ID NO: 406388 - DNA, 20 bp, Artificial Sequence
  Description of Artificial Sequence: Synthetic oligonucleotide
  Target: LAMA2; (+) strand; PAM type: YTN; PAM sequence: TTA
tctgtgttactcaaaaactg

SEQ ID NO: 406389 - DNA, 20 bp, Artificial Sequence
  Description of Artificial Sequence: Synthetic oligonucleotide
  Target: LAMA2; (+) strand; PAM type: YTN; PAM sequence: CTG
tgttactcaaaaactgaaaa

SEQ ID NO: 406390 - DNA, 20 bp, Artificial Sequence
  Description of Artificial Sequence: Synthetic oligonucleotide
  Target: LAMA2; (+) strand; PAM type: YTN; PAM sequence: TTA
ctcaaaaactgaaaacaaat

SEQ ID NO: 406391 - DNA, 20 bp, Artificial Sequence
  Description of Artificial Sequence: Synthetic oligonucleotide
  Target: LAMA2; (+) strand; PAM type: YTN; PAM sequence: CTC
aaaaactgaaaacaaatcac

SEQ ID NO: 406392 - DNA, 20 bp, Artificial Sequence
  Description of Artificial Sequence: Synthetic oligonucleotide
  Target: LAMA2; (+) strand; PAM type: YTN; PAM sequence: CTG
aaaacaaatcacatatccat

SEQ ID NO: 406393 - DNA, 20 bp, Artificial Sequence
  Description of Artificial Sequence: Synthetic oligonucleotide
  Target: LAMA2; (+) strand; PAM type: YTN; PAM sequence: TTG
tggtatactcatacaatgga

SEQ ID NO: 406394 - DNA, 20 bp, Artificial Sequence
  Description of Artificial Sequence: Synthetic oligonucleotide
  Target: LAMA2; (+) strand; PAM type: YTN; PAM sequence: CTC
atacaatggaatactagcaa

SEQ ID NO: 406395 - DNA, 20 bp, Artificial Sequence
  Description of Artificial Sequence: Synthetic oligonucleotide
  Target: LAMA2; (+) strand; PAM type: YTN; PAM sequence: CTA
gcaataaaatactcagcaat

SEQ ID NO: 406396 - DNA, 20 bp, Artificial Sequence
  Description of Artificial Sequence: Synthetic oligonucleotide
  Target: LAMA2; (+) strand; PAM type: YTN; PAM sequence: CTC
agcaataaaaaataaagtat

SEQ ID NO: 406397 - DNA, 20 bp, Artificial Sequence
  Description of Artificial Sequence: Synthetic oligonucleotide
  Target: LAMA2; (+) strand; PAM type: YTN; PAM sequence: TTA
atatagatacaaaatggatg

SEQ ID NO: 406398 - DNA, 20 bp, Artificial Sequence
  Description of Artificial Sequence: Synthetic oligonucleotide
  Target: LAMA2; (+) strand; PAM type: YTN; PAM sequence: TTT
aggcagacacaaaaaaatac

SEQ ID NO: 406399 - DNA, 20 bp, Artificial Sequence
  Description of Artificial Sequence: Synthetic oligonucleotide
  Target: LAMA2; (+) strand; PAM type: YTN; PAM sequence: TTA
ggcagacacaaaaaaataca

SEQ ID NO: 406400 - DNA, 20 bp, Artificial Sequence
  Description of Artificial Sequence: Synthetic oligonucleotide
  Target: LAMA2; (+) strand; PAM type: YTN; PAM sequence: TTT
gtataaaattacatagaaaa

SEQ ID NO: 406401 - DNA, 20 bp, Artificial Sequence
  Description of Artificial Sequence: Synthetic oligonucleotide
  Target: LAMA2; (+) strand; PAM type: YTN; PAM sequence: TTG
tataaaattacatagaaaat

SEQ ID NO: 406402 - DNA, 20 bp, Artificial Sequence
  Description of Artificial Sequence: Synthetic oligonucleotide
  Target: LAMA2; (+) strand; PAM type: YTN; PAM sequence: TTA
catagaaaatgtaaactaat

SEQ ID NO: 406403 - DNA, 20 bp, Artificial Sequence
  Description of Artificial Sequence: Synthetic oligonucleotide
  Target: LAMA2; (+) strand; PAM type: YTN; PAM sequence: CTA
atctatagtcacagaaagca

SEQ ID NO: 406404 - DNA, 20 bp, Artificial Sequence
  Description of Artificial Sequence: Synthetic oligonucleotide
  Target: LAMA2; (+) strand; PAM type: YTN; PAM sequence: CTA
tagtcacagaaagcagacgg

SEQ ID NO: 406405 - DNA, 20 bp, Artificial Sequence
  Description of Artificial Sequence: Synthetic oligonucleotide
  Target: LAMA2; (+) strand; PAM type: YTN; PAM sequence: CTA
cttgtgaatggtatatgtac

SEQ ID NO: 406406 - DNA, 20 bp, Artificial Sequence
  Description of Artificial Sequence: Synthetic oligonucleotide
  Target: LAMA2; (+) strand; PAM type: YTN; PAM sequence: CTT
gtgaatggtatatgtacgaa

SEQ ID NO: 406407 - DNA, 20 bp, Artificial Sequence
  Description of Artificial Sequence: Synthetic oligonucleotide
  Target: LAMA2; (+) strand; PAM type: YTN; PAM sequence: TTG
tgaatggtatatgtacgaaa

SEQ ID NO: 406408 - DNA, 20 bp, Artificial Sequence
  Description of Artificial Sequence: Synthetic oligonucleotide
  Target: LAMA2; (+) strand; PAM type: YTN; PAM sequence: TTA
caaatgagcataaagaaact

SEQ ID NO: 406409 - DNA, 20 bp, Artificial Sequence
  Description of Artificial Sequence: Synthetic oligonucleotide
  Target: LAMA2; (+) strand; PAM type: YTN; PAM sequence: CTT
ctggggtgatggatgtgttc

SEQ ID NO: 406410 - DNA, 20 bp, Artificial Sequence
  Description of Artificial Sequence: Synthetic oligonucleotide
  Target: LAMA2; (+) strand; PAM type: YTN; PAM sequence: TTC
tggggtgatggatgtgttca

SEQ ID NO: 406411 - DNA, 20 bp, Artificial Sequence
  Description of Artificial Sequence: Synthetic oligonucleotide
  Target: LAMA2; (+) strand; PAM type: YTN; PAM sequence: CTG
gggtgatggatgtgttcatt

SEQ ID NO: 406412 - DNA, 20 bp, Artificial Sequence
  Description of Artificial Sequence: Synthetic oligonucleotide
  Target: LAMA2; (+) strand; PAM type: YTN; PAM sequence: TTC
attgagtgtggtggtggttc

SEQ ID NO: 406413 - DNA, 20 bp, Artificial Sequence
  Description of Artificial Sequence: Synthetic oligonucleotide
  Target: LAMA2; (+) strand; PAM type: YTN; PAM sequence: TTG
agtgtggtggtggttctgca

SEQ ID NO: 406414 - DNA, 20 bp, Artificial Sequence
  Description of Artificial Sequence: Synthetic oligonucleotide
  Target: LAMA2; (+) strand; PAM type: YTN; PAM sequence: TTC
tgcaggtgtatacaattaca

SEQ ID NO: 406415 - DNA, 20 bp, Artificial Sequence
  Description of Artificial Sequence: Synthetic oligonucleotide
  Target: LAMA2; (+) strand; PAM type: YTN; PAM sequence: CTG
caggtgtatacaattacatg

SEQ ID NO: 406416 - DNA, 20 bp, Artificial Sequence
  Description of Artificial Sequence: Synthetic oligonucleotide
  Target: LAMA2; (+) strand; PAM type: YTN; PAM sequence: TTA
catgttacaaacatggttta

SEQ ID NO: 406417 - DNA, 20 bp, Artificial Sequence
  Description of Artificial Sequence: Synthetic oligonucleotide
  Target: LAMA2; (+) strand; PAM type: YTN; PAM sequence: TTA
caaacatggtttaaattata

SEQ ID NO: 406418 - DNA, 20 bp, Artificial Sequence
  Description of Artificial Sequence: Synthetic oligonucleotide
  Target: LAMA2; (+) strand; PAM type: YTN; PAM sequence: TTT
aaattatagcatgttaatta

SEQ ID NO: 406419 - DNA, 20 bp, Artificial Sequence
  Description of Artificial Sequence: Synthetic oligonucleotide
  Target: LAMA2; (+) strand; PAM type: YTN; PAM sequence: TTA
aattatagcatgttaattat

SEQ ID NO: 406420 - DNA, 20 bp, Artificial Sequence
  Description of Artificial Sequence: Synthetic oligonucleotide
  Target: LAMA2; (+) strand; PAM type: YTN; PAM sequence: TTA
tagcatgttaattattcctc

SEQ ID NO: 406421 - DNA, 20 bp, Artificial Sequence
  Description of Artificial Sequence: Synthetic oligonucleotide
  Target: LAMA2; (+) strand; PAM type: YTN; PAM sequence: TTA
attattcctcagtaaaactg

SEQ ID NO: 406422 - DNA, 20 bp, Artificial Sequence
  Description of Artificial Sequence: Synthetic oligonucleotide
  Target: LAMA2; (+) strand; PAM type: YTN; PAM sequence: TTA
ttcctcagtaaaactgtttt

SEQ ID NO: 406423 - DNA, 20 bp, Artificial Sequence
  Description of Artificial Sequence: Synthetic oligonucleotide
  Target: LAMA2; (+) strand; PAM type: YTN; PAM sequence: TTC
ctcagtaaaactgttttaaa

SEQ ID NO: 406424 - DNA, 20 bp, Artificial Sequence
  Description of Artificial Sequence: Synthetic oligonucleotide
  Target: LAMA2; (+) strand; PAM type: YTN; PAM sequence: CTC
agtaaaactgttttaaaaat

SEQ ID NO: 406425 - DNA, 20 bp, Artificial Sequence
  Description of Artificial Sequence: Synthetic oligonucleotide
  Target: LAMA2; (+) strand; PAM type: YTN; PAM sequence: CTG
ttttaaaaataggacagata

SEQ ID NO: 406426 - DNA, 20 bp, Artificial Sequence
  Description of Artificial Sequence: Synthetic oligonucleotide
  Target: LAMA2; (+) strand; PAM type: YTN; PAM sequence: TTT
taaaaataggacagatatta

SEQ ID NO: 406427 - DNA, 20 bp, Artificial Sequence
  Description of Artificial Sequence: Synthetic oligonucleotide
  Target: LAMA2; (+) strand; PAM type: YTN; PAM sequence: TTT
aaaaataggacagatattag

SEQ ID NO: 406428 - DNA, 20 bp, Artificial Sequence
  Description of Artificial Sequence: Synthetic oligonucleotide
  Target: LAMA2; (+) strand; PAM type: YTN; PAM sequence: TTA
aaaataggacagatattaga

SEQ ID NO: 406429 - DNA, 20 bp, Artificial Sequence
  Description of Artificial Sequence: Synthetic oligonucleotide
  Target: LAMA2; (+) strand; PAM type: YTN; PAM sequence: TTA
gaggtatttaggagaagaaa

SEQ ID NO: 406430 - DNA, 20 bp, Artificial Sequence
  Description of Artificial Sequence: Synthetic oligonucleotide
  Target: LAMA2; (+) strand; PAM type: YTN; PAM sequence: TTT
aggagaagaaattagtgaag

SEQ ID NO: 406431 - DNA, 20 bp, Artificial Sequence
  Description of Artificial Sequence: Synthetic oligonucleotide
  Target: LAMA2; (+) strand; PAM type: YTN; PAM sequence: TTA
ggagaagaaattagtgaagc

SEQ ID NO: 406432 - DNA, 20 bp, Artificial Sequence
  Description of Artificial Sequence: Synthetic oligonucleotide
  Target: LAMA2; (+) strand; PAM type: YTN; PAM sequence: TTA
gtgaagctgttgattgatta

SEQ ID NO: 406433 - DNA, 20 bp, Artificial Sequence
  Description of Artificial Sequence: Synthetic oligonucleotide
  Target: LAMA2; (+) strand; PAM type: YTN; PAM sequence: CTG
ttgattgattagatgtggtg

SEQ ID NO: 406434 - DNA, 20 bp, Artificial Sequence
  Description of Artificial Sequence: Synthetic oligonucleotide
  Target: LAMA2; (+) strand; PAM type: YTN; PAM sequence: TTG
attgattagatgtggtgagg

SEQ ID NO: 406435 - DNA, 20 bp, Artificial Sequence
  Description of Artificial Sequence: Synthetic oligonucleotide
  Target: LAMA2; (+) strand; PAM type: YTN; PAM sequence: TTG
attagatgtggtgaggagaa

SEQ ID NO: 406436 - DNA, 20 bp, Artificial Sequence
  Description of Artificial Sequence: Synthetic oligonucleotide
  Target: LAMA2; (+) strand; PAM type: YTN; PAM sequence: TTA
gatgtggtgaggagaaagtc

SEQ ID NO: 406437 - DNA, 20 bp, Artificial Sequence
  Description of Artificial Sequence: Synthetic oligonucleotide
  Target: LAMA2; (+) strand; PAM type: YTN; PAM sequence: CTC
tctagtttagtagattgggt

SEQ ID NO: 406438 - DNA, 20 bp, Artificial Sequence
  Description of Artificial Sequence: Synthetic oligonucleotide
  Target: LAMA2; (+) strand; PAM type: YTN; PAM sequence: CTC
tagtttagtagattgggtgg

SEQ ID NO: 406439 - DNA, 20 bp, Artificial Sequence
  Description of Artificial Sequence: Synthetic oligonucleotide
  Target: LAMA2; (+) strand; PAM type: YTN; PAM sequence: CTA
gtttagtagattgggtgggg

SEQ ID NO: 406440 - DNA, 20 bp, Artificial Sequence
  Description of Artificial Sequence: Synthetic oligonucleotide
  Target: LAMA2; (+) strand; PAM type: YTN; PAM sequence: TTT
agtagattgggtgggggggt

SEQ ID NO: 406441 - DNA, 20 bp, Artificial Sequence
  Description of Artificial Sequence: Synthetic oligonucleotide
  Target: LAMA2; (+) strand; PAM type: YTN; PAM sequence: TTA
gtagattgggtgggggggtc

SEQ ID NO: 406442 - DNA, 20 bp, Artificial Sequence
  Description of Artificial Sequence: Synthetic oligonucleotide
  Target: LAMA2; (+) strand; PAM type: YTN; PAM sequence: TTG
ggtgggggggtcataagacc

SEQ ID NO: 406443 - DNA, 20 bp, Artificial Sequence
  Description of Artificial Sequence: Synthetic oligonucleotide
  Target: LAMA2; (+) strand; PAM type: YTN; PAM sequence: TTA
agtaatacagatttgggagt

SEQ ID NO: 406444 - DNA, 20 bp, Artificial Sequence
  Description of Artificial Sequence: Synthetic oligonucleotide
  Target: LAMA2; (+) strand; PAM type: YTN; PAM sequence: TTT
gggagttagatgataattat

SEQ ID NO: 406445 - DNA, 20 bp, Artificial Sequence
  Description of Artificial Sequence: Synthetic oligonucleotide
  Target: LAMA2; (+) strand; PAM type: YTN; PAM sequence: TTG
ggagttagatgataattatt

SEQ ID NO: 406446 - DNA, 20 bp, Artificial Sequence
  Description of Artificial Sequence: Synthetic oligonucleotide
  Target: LAMA2; (+) strand; PAM type: YTN; PAM sequence: TTA
gatgataattattttgattt

SEQ ID NO: 406447 - DNA, 20 bp, Artificial Sequence
  Description of Artificial Sequence: Synthetic oligonucleotide
  Target: LAMA2; (+) strand; PAM type: YTN; PAM sequence: TTA
ttttgatttggaatgtttag

SEQ ID NO: 406448 - DNA, 20 bp, Artificial Sequence
  Description of Artificial Sequence: Synthetic oligonucleotide
  Target: LAMA2; (+) strand; PAM type: YTN; PAM sequence: TTT
tgatttggaatgtttagctt

SEQ ID NO: 406449 - DNA, 20 bp, Artificial Sequence
  Description of Artificial Sequence: Synthetic oligonucleotide
  Target: LAMA2; (+) strand; PAM type: YTN; PAM sequence: TTT
gatttggaatgtttagctta

SEQ ID NO: 406450 - DNA, 20 bp, Artificial Sequence
  Description of Artificial Sequence: Synthetic oligonucleotide
  Target: LAMA2; (+) strand; PAM type: YTN; PAM sequence: TTG
atttggaatgtttagcttaa

SEQ ID NO: 406451 - DNA, 20 bp, Artificial Sequence
  Description of Artificial Sequence: Synthetic oligonucleotide
  Target: LAMA2; (+) strand; PAM type: YTN; PAM sequence: TTT
ggaatgtttagcttaaagta

SEQ ID NO: 406452 - DNA, 20 bp, Artificial Sequence
  Description of Artificial Sequence: Synthetic oligonucleotide
  Target: LAMA2; (+) strand; PAM type: YTN; PAM sequence: TTG
gaatgtttagcttaaagtac

SEQ ID NO: 406453 - DNA, 20 bp, Artificial Sequence
  Description of Artificial Sequence: Synthetic oligonucleotide
  Target: LAMA2; (+) strand; PAM type: YTN; PAM sequence: TTT
agcttaaagtacgcaaggaa

SEQ ID NO: 406454 - DNA, 20 bp, Artificial Sequence
  Description of Artificial Sequence: Synthetic oligonucleotide
  Target: LAMA2; (+) strand; PAM type: YTN; PAM sequence: TTA
gcttaaagtacgcaaggaaa

SEQ ID NO: 406455 - DNA, 20 bp, Artificial Sequence
  Description of Artificial Sequence: Synthetic oligonucleotide
  Target: LAMA2; (+) strand; PAM type: YTN; PAM sequence: CTT
aaagtacgcaaggaaaatat

SEQ ID NO: 406456 - DNA, 20 bp, Artificial Sequence
  Description of Artificial Sequence: Synthetic oligonucleotide
  Target: LAMA2; (+) strand; PAM type: YTN; PAM sequence: TTA
aagtacgcaaggaaaatata

SEQ ID NO: 406457 - DNA, 20 bp, Artificial Sequence
  Description of Artificial Sequence: Synthetic oligonucleotide
  Target: LAMA2; (+) strand; PAM type: YTN; PAM sequence: CTC
acctgttgaatgtggacttt

SEQ ID NO: 406458 - DNA, 20 bp, Artificial Sequence
  Description of Artificial Sequence: Synthetic oligonucleotide
  Target: LAMA2; (+) strand; PAM type: YTN; PAM sequence: CTG
ttgaatgtggacttttaggc

SEQ ID NO: 406459 - DNA, 20 bp, Artificial Sequence
  Description of Artificial Sequence: Synthetic oligonucleotide
  Target: LAMA2; (+) strand; PAM type: YTN; PAM sequence: TTG
aatgtggacttttaggcaaa

SEQ ID NO: 406460 - DNA, 20 bp, Artificial Sequence
  Description of Artificial Sequence: Synthetic oligonucleotide
  Target: LAMA2; (+) strand; PAM type: YTN; PAM sequence: CTT
ttaggcaaaaatcaggtcca

SEQ ID NO: 406461 - DNA, 20 bp, Artificial Sequence
  Description of Artificial Sequence: Synthetic oligonucleotide
  Target: LAMA2; (+) strand; PAM type: YTN; PAM sequence: TTT
taggcaaaaatcaggtccaa

SEQ ID NO: 406462 - DNA, 20 bp, Artificial Sequence
  Description of Artificial Sequence: Synthetic oligonucleotide
  Target: LAMA2; (+) strand; PAM type: YTN; PAM sequence: TTT
aggcaaaaatcaggtccaag

SEQ ID NO: 406463 - DNA, 20 bp, Artificial Sequence
  Description of Artificial Sequence: Synthetic oligonucleotide
  Target: LAMA2; (+) strand; PAM type: YTN; PAM sequence: TTA
ggcaaaaatcaggtccaagc

SEQ ID NO: 406464 - DNA, 20 bp, Artificial Sequence
  Description of Artificial Sequence: Synthetic oligonucleotide
  Target: LAMA2; (+) strand; PAM type: YTN; PAM sequence: TTT
aagtcatcaatacattgtaa

SEQ ID NO: 406465 - DNA, 20 bp, Artificial Sequence
  Description of Artificial Sequence: Synthetic oligonucleotide
  Target: LAMA2; (+) strand; PAM type: YTN; PAM sequence: TTA
agtcatcaatacattgtaag

SEQ ID NO: 406466 - DNA, 20 bp, Artificial Sequence
  Description of Artificial Sequence: Synthetic oligonucleotide
  Target: LAMA2; (+) strand; PAM type: YTN; PAM sequence: TTG
taagtagatataaacttgag

SEQ ID NO: 406467 - DNA, 20 bp, Artificial Sequence
  Description of Artificial Sequence: Synthetic oligonucleotide
  Target: LAMA2; (+) strand; PAM type: YTN; PAM sequence: CTT
gagtttgcccagatggctaa

SEQ ID NO: 406468 - DNA, 20 bp, Artificial Sequence
  Description of Artificial Sequence: Synthetic oligonucleotide
  Target: LAMA2; (+) strand; PAM type: YTN; PAM sequence: TTG
agtttgcccagatggctaaa

SEQ ID NO: 406469 - DNA, 20 bp, Artificial Sequence
  Description of Artificial Sequence: Synthetic oligonucleotide
  Target: LAMA2; (+) strand; PAM type: YTN; PAM sequence: TTT
gcccagatggctaaaacctg

SEQ ID NO: 406470 - DNA, 20 bp, Artificial Sequence
  Description of Artificial Sequence: Synthetic oligonucleotide
  Target: LAMA2; (+) strand; PAM type: YTN; PAM sequence: TTG
cccagatggctaaaacctga

SEQ ID NO: 406471 - DNA, 20 bp, Artificial Sequence
  Description of Artificial Sequence: Synthetic oligonucleotide
  Target: LAMA2; (+) strand; PAM type: YTN; PAM sequence: CTA
aaacctgagatgtgggcaaa

SEQ ID NO: 406472 - DNA, 20 bp, Artificial Sequence
  Description of Artificial Sequence: Synthetic oligonucleotide
  Target: LAMA2; (+) strand; PAM type: YTN; PAM sequence: CTG
agatgtgggcaaaggaaggg

SEQ ID NO: 406473 - DNA, 20 bp, Artificial Sequence
  Description of Artificial Sequence: Synthetic oligonucleotide
  Target: LAMA2; (+) strand; PAM type: YTN; PAM sequence: TTA
taaaacatcaacattttaga

SEQ ID NO: 406474 - DNA, 20 bp, Artificial Sequence
  Description of Artificial Sequence: Synthetic oligonucleotide
  Target: LAMA2; (+) strand; PAM type: YTN; PAM sequence: TTT
tagaagtgttcaaaaataga

SEQ ID NO: 406475 - DNA, 20 bp, Artificial Sequence
  Description of Artificial Sequence: Synthetic oligonucleotide
  Target: LAMA2; (+) strand; PAM type: YTN; PAM sequence: TTT
agaagtgttcaaaaatagac

SEQ ID NO: 406476 - DNA, 20 bp, Artificial Sequence
  Description of Artificial Sequence: Synthetic oligonucleotide
  Target: LAMA2; (+) strand; PAM type: YTN; PAM sequence: TTA
gaagtgttcaaaaatagacc

SEQ ID NO: 406477 - DNA, 20 bp, Artificial Sequence
  Description of Artificial Sequence: Synthetic oligonucleotide
  Target: LAMA2; (+) strand; PAM type: YTN; PAM sequence: TTC
aaaaatagaccccagggtag

SEQ ID NO: 406478 - DNA, 20 bp, Artificial Sequence
  Description of Artificial Sequence: Synthetic oligonucleotide
  Target: LAMA2; (+) strand; PAM type: YTN; PAM sequence: TTG
agaatgaaaggtaaaagaag

SEQ ID NO: 406479 - DNA, 20 bp, Artificial Sequence
  Description of Artificial Sequence: Synthetic oligonucleotide
  Target: LAMA2; (+) strand; PAM type: YTN; PAM sequence: CTT
gacattatggaagccagaag

SEQ ID NO: 406480 - DNA, 20 bp, Artificial Sequence
  Description of Artificial Sequence: Synthetic oligonucleotide
  Target: LAMA2; (+) strand; PAM type: YTN; PAM sequence: TTG
acattatggaagccagaaga

SEQ ID NO: 406481 - DNA, 20 bp, Artificial Sequence
  Description of Artificial Sequence: Synthetic oligonucleotide
  Target: LAMA2; (+) strand; PAM type: YTN; PAM sequence: TTA
tggaagccagaagaaatttc

SEQ ID NO: 406482 - DNA, 20 bp, Artificial Sequence
  Description of Artificial Sequence: Synthetic oligonucleotide
  Target: LAMA2; (+) strand; PAM type: YTN; PAM sequence: TTT
cctatagggaaggaaatgct

SEQ ID NO: 406483 - DNA, 20 bp, Artificial Sequence
  Description of Artificial Sequence: Synthetic oligonucleotide
  Target: LAMA2; (+) strand; PAM type: YTN; PAM sequence: TTC
ctatagggaaggaaatgcta

SEQ ID NO: 406484 - DNA, 20 bp, Artificial Sequence
  Description of Artificial Sequence: Synthetic oligonucleotide
  Target: LAMA2; (+) strand; PAM type: YTN; PAM sequence: CTA
tagggaaggaaatgctaaca

SEQ ID NO: 406485 - DNA, 20 bp, Artificial Sequence
  Description of Artificial Sequence: Synthetic oligonucleotide
  Target: LAMA2; (+) strand; PAM type: YTN; PAM sequence: CTA
acagcattaaatattgcaca

SEQ ID NO: 406486 - DNA, 20 bp, Artificial Sequence
  Description of Artificial Sequence: Synthetic oligonucleotide
  Target: LAMA2; (+) strand; PAM type: YTN; PAM sequence: TTA
aatattgcacaaacatgaat

SEQ ID NO: 406487 - DNA, 20 bp, Artificial Sequence
  Description of Artificial Sequence: Synthetic oligonucleotide
  Target: LAMA2; (+) strand; PAM type: YTN; PAM sequence: TTG
cacaaacatgaattcagata

SEQ ID NO: 406488 - DNA, 20 bp, Artificial Sequence
  Description of Artificial Sequence: Synthetic oligonucleotide
  Target: LAMA2; (+) strand; PAM type: YTN; PAM sequence: TTC
agataaagtttaaaagaact

SEQ ID NO: 406489 - DNA, 20 bp, Artificial Sequence
  Description of Artificial Sequence: Synthetic oligonucleotide
  Target: LAMA2; (+) strand; PAM type: YTN; PAM sequence: TTT
aaaagaactccactgagttt

SEQ ID NO: 406490 - DNA, 20 bp, Artificial Sequence
  Description of Artificial Sequence: Synthetic oligonucleotide
  Target: LAMA2; (+) strand; PAM type: YTN; PAM sequence: TTA
aaagaactccactgagtttg

SEQ ID NO: 406491 - DNA, 20 bp, Artificial Sequence
  Description of Artificial Sequence: Synthetic oligonucleotide
  Target: LAMA2; (+) strand; PAM type: YTN; PAM sequence: CTC
cactgagtttgggtataggc

SEQ ID NO: 406492 - DNA, 20 bp, Artificial Sequence
  Description of Artificial Sequence: Synthetic oligonucleotide
  Target: LAMA2; (+) strand; PAM type: YTN; PAM sequence: CTG
agtttgggtataggcaggtc

SEQ ID NO: 406493 - DNA, 20 bp, Artificial Sequence
  Description of Artificial Sequence: Synthetic oligonucleotide
  Target: LAMA2; (+) strand; PAM type: YTN; PAM sequence: TTT
gggtataggcaggtccctga

SEQ ID NO: 406494 - DNA, 20 bp, Artificial Sequence
  Description of Artificial Sequence: Synthetic oligonucleotide
  Target: LAMA2; (+) strand; PAM type: YTN; PAM sequence: TTG
ggtataggcaggtccctgag

SEQ ID NO: 406495 - DNA, 20 bp, Artificial Sequence
  Description of Artificial Sequence: Synthetic oligonucleotide
  Target: LAMA2; (+) strand; PAM type: YTN; PAM sequence: CTG
aggactttagcaagaccaga

SEQ ID NO: 406496 - DNA, 20 bp, Artificial Sequence
  Description of Artificial Sequence: Synthetic oligonucleotide
  Target: LAMA2; (+) strand; PAM type: YTN; PAM sequence: CTT
tagcaagaccagagatgaca

SEQ ID NO: 406497 - DNA, 20 bp, Artificial Sequence
  Description of Artificial Sequence: Synthetic oligonucleotide
  Target: LAMA2; (+) strand; PAM type: YTN; PAM sequence: TTT
agcaagaccagagatgacag

SEQ ID NO: 406498 - DNA, 20 bp, Artificial Sequence
  Description of Artificial Sequence: Synthetic oligonucleotide
  Target: LAMA2; (+) strand; PAM type: YTN; PAM sequence: TTA
gcaagaccagagatgacaga

SEQ ID NO: 406499 - DNA, 20 bp, Artificial Sequence
  Description of Artificial Sequence: Synthetic oligonucleotide
  Target: LAMA2; (+) strand; PAM type: YTN; PAM sequence: TTG
aaataaggctccagcaatgt

SEQ ID NO: 406500 - DNA, 20 bp, Artificial Sequence
  Description of Artificial Sequence: Synthetic oligonucleotide
  Target: LAMA2; (+) strand; PAM type: YTN; PAM sequence: CTC
cagcaatgtggatgattgct

SEQ ID NO: 406501 - DNA, 20 bp, Artificial Sequence
  Description of Artificial Sequence: Synthetic oligonucleotide
  Target: LAMA2; (+) strand; PAM type: YTN; PAM sequence: TTG
ctccttttcagtgaccagat

SEQ ID NO: 406502 - DNA, 20 bp, Artificial Sequence
  Description of Artificial Sequence: Synthetic oligonucleotide
  Target: LAMA2; (+) strand; PAM type: YTN; PAM sequence: CTC
cttttcagtgaccagattat

SEQ ID NO: 406503 - DNA, 20 bp, Artificial Sequence
  Description of Artificial Sequence: Synthetic oligonucleotide
  Target: LAMA2; (+) strand; PAM type: YTN; PAM sequence: CTT
ttcagtgaccagattatttg

SEQ ID NO: 406504 - DNA, 20 bp, Artificial Sequence
  Description of Artificial Sequence: Synthetic oligonucleotide
  Target: LAMA2; (+) strand; PAM type: YTN; PAM sequence: TTT
tcagtgaccagattatttgt

SEQ ID NO: 406505 - DNA, 20 bp, Artificial Sequence
  Description of Artificial Sequence: Synthetic oligonucleotide
  Target: LAMA2; (+) strand; PAM type: YTN; PAM sequence: TTT
cagtgaccagattatttgtt

SEQ ID NO: 406506 - DNA, 20 bp, Artificial Sequence
  Description of Artificial Sequence: Synthetic oligonucleotide
  Target: LAMA2; (+) strand; PAM type: YTN; PAM sequence: TTC
agtgaccagattatttgttt

SEQ ID NO: 406507 - DNA, 20 bp, Artificial Sequence
  Description of Artificial Sequence: Synthetic oligonucleotide
  Target: LAMA2; (+) strand; PAM type: YTN; PAM sequence: TTA
tttgttttatatgaattatt

SEQ ID NO: 406508 - DNA, 20 bp, Artificial Sequence
  Description of Artificial Sequence: Synthetic oligonucleotide
  Target: LAMA2; (+) strand; PAM type: YTN; PAM sequence: TTT
gttttatatgaattattctc

SEQ ID NO: 406509 - DNA, 20 bp, Artificial Sequence
  Description of Artificial Sequence: Synthetic oligonucleotide
  Target: LAMA2; (+) strand; PAM type: YTN; PAM sequence: TTG
ttttatatgaattattctca

SEQ ID NO: 406510 - DNA, 20 bp, Artificial Sequence
  Description of Artificial Sequence: Synthetic oligonucleotide
  Target: LAMA2; (+) strand; PAM type: YTN; PAM sequence: TTT
tatatgaattattctcaact

SEQ ID NO: 406511 - DNA, 20 bp, Artificial Sequence
  Description of Artificial Sequence: Synthetic oligonucleotide
  Target: LAMA2; (+) strand; PAM type: YTN; PAM sequence: TTT
atatgaattattctcaacta

SEQ ID NO: 406512 - DNA, 20 bp, Artificial Sequence
  Description of Artificial Sequence: Synthetic oligonucleotide
  Target: LAMA2; (+) strand; PAM type: YTN; PAM sequence: TTA
tatgaattattctcaactag

SEQ ID NO: 406513 - DNA, 20 bp, Artificial Sequence
  Description of Artificial Sequence: Synthetic oligonucleotide
  Target: LAMA2; (+) strand; PAM type: YTN; PAM sequence: TTA
ttctcaactagttggcaaga

SEQ ID NO: 406514 - DNA, 20 bp, Artificial Sequence
  Description of Artificial Sequence: Synthetic oligonucleotide
  Target: LAMA2; (+) strand; PAM type: YTN; PAM sequence: TTC
tcaactagttggcaagagca

SEQ ID NO: 406515 - DNA, 20 bp, Artificial Sequence
  Description of Artificial Sequence: Synthetic oligonucleotide
  Target: LAMA2; (+) strand; PAM type: YTN; PAM sequence: CTC
aactagttggcaagagcact

SEQ ID NO: 406516 - DNA, 20 bp, Artificial Sequence
  Description of Artificial Sequence: Synthetic oligonucleotide
  Target: LAMA2; (+) strand; PAM type: YTN; PAM sequence: CTA
gttggcaagagcactgtctc

SEQ ID NO: 406517 - DNA, 20 bp, Artificial Sequence
  Description of Artificial Sequence: Synthetic oligonucleotide
  Target: LAMA2; (+) strand; PAM type: YTN; PAM sequence: TTG
gcaagagcactgtctcttga

SEQ ID NO: 406518 - DNA, 20 bp, Artificial Sequence
  Description of Artificial Sequence: Synthetic oligonucleotide
  Target: LAMA2; (+) strand; PAM type: YTN; PAM sequence: CTG
tctcttgaaattcaagtaca

SEQ ID NO: 406519 - DNA, 20 bp, Artificial Sequence
  Description of Artificial Sequence: Synthetic oligonucleotide
  Target: LAMA2; (+) strand; PAM type: YTN; PAM sequence: CTC
ttgaaattcaagtacagtcc

SEQ ID NO: 406520 - DNA, 20 bp, Artificial Sequence
  Description of Artificial Sequence: Synthetic oligonucleotide
  Target: LAMA2; (+) strand; PAM type: YTN; PAM sequence: CTT
gaaattcaagtacagtcctt

SEQ ID NO: 406521 - DNA, 20 bp, Artificial Sequence
  Description of Artificial Sequence: Synthetic oligonucleotide
  Target: LAMA2; (+) strand; PAM type: YTN; PAM sequence: TTG
aaattcaagtacagtccttc

SEQ ID NO: 406522 - DNA, 20 bp, Artificial Sequence
  Description of Artificial Sequence: Synthetic oligonucleotide
  Target: LAMA2; (+) strand; PAM type: YTN; PAM sequence: TTC
aagtacagtccttcaggagt

SEQ ID NO: 406523 - DNA, 20 bp, Artificial Sequence
  Description of Artificial Sequence: Synthetic oligonucleotide
  Target: LAMA2; (+) strand; PAM type: YTN; PAM sequence: CTT
caggagtgttccccatcttt

SEQ ID NO: 406524 - DNA, 20 bp, Artificial Sequence
  Description of Artificial Sequence: Synthetic oligonucleotide
  Target: LAMA2; (+) strand; PAM type: YTN; PAM sequence: TTC
aggagtgttccccatctttc

SEQ ID NO: 406525 - DNA, 20 bp, Artificial Sequence
  Description of Artificial Sequence: Synthetic oligonucleotide
  Target: LAMA2; (+) strand; PAM type: YTN; PAM sequence: TTC
cccatctttcttgagtcagt

SEQ ID NO: 406526 - DNA, 20 bp, Artificial Sequence
  Description of Artificial Sequence: Synthetic oligonucleotide
  Target: LAMA2; (+) strand; PAM type: YTN; PAM sequence: CTT
tcttgagtcagttacagaac

SEQ ID NO: 406527 - DNA, 20 bp, Artificial Sequence
  Description of Artificial Sequence: Synthetic oligonucleotide
  Target: LAMA2; (+) strand; PAM type: YTN; PAM sequence: TTT
cttgagtcagttacagaacc

SEQ ID NO: 406528 - DNA, 20 bp, Artificial Sequence
  Description of Artificial Sequence: Synthetic oligonucleotide
  Target: LAMA2; (+) strand; PAM type: YTN; PAM sequence: TTC
ttgagtcagttacagaacca

SEQ ID NO: 406529 - DNA, 20 bp, Artificial Sequence
  Description of Artificial Sequence: Synthetic oligonucleotide
  Target: LAMA2; (+) strand; PAM type: YTN; PAM sequence: CTT
gagtcagttacagaaccaca

SEQ ID NO: 406530 - DNA, 20 bp, Artificial Sequence
  Description of Artificial Sequence: Synthetic oligonucleotide
  Target: LAMA2; (+) strand; PAM type: YTN; PAM sequence: TTG
agtcagttacagaaccacag

SEQ ID NO: 406531 - DNA, 20 bp, Artificial Sequence
  Description of Artificial Sequence: Synthetic oligonucleotide
  Target: LAMA2; (+) strand; PAM type: YTN; PAM sequence: TTA
cagaaccacagtccctgaca

SEQ ID NO: 406532 - DNA, 20 bp, Artificial Sequence
  Description of Artificial Sequence: Synthetic oligonucleotide
  Target: LAMA2; (+) strand; PAM type: YTN; PAM sequence: CTG
acagaagtgtgccctatccc

SEQ ID NO: 406533 - DNA, 20 bp, Artificial Sequence
  Description of Artificial Sequence: Synthetic oligonucleotide
  Target: LAMA2; (+) strand; PAM type: YTN; PAM sequence: CTA
tcccctaaatgcatcaagta

SEQ ID NO: 406534 - DNA, 20 bp, Artificial Sequence
  Description of Artificial Sequence: Synthetic oligonucleotide
  Target: LAMA2; (+) strand; PAM type: YTN; PAM sequence: CTA
aatgcatcaagtaggatgca

SEQ ID NO: 406535 - DNA, 20 bp, Artificial Sequence
  Description of Artificial Sequence: Synthetic oligonucleotide
  Target: LAMA2; (+) strand; PAM type: YTN; PAM sequence: TTG
agaacactcaattagatttt

SEQ ID NO: 406536 - DNA, 20 bp, Artificial Sequence
  Description of Artificial Sequence: Synthetic oligonucleotide
  Target: LAMA2; (+) strand; PAM type: YTN; PAM sequence: CTC
aattagattttcagtggatc

SEQ ID NO: 406537 - DNA, 20 bp, Artificial Sequence
  Description of Artificial Sequence: Synthetic oligonucleotide
  Target: LAMA2; (+) strand; PAM type: YTN; PAM sequence: TTA
gattttcagtggatcaagaa

SEQ ID NO: 406538 - DNA, 20 bp, Artificial Sequence
  Description of Artificial Sequence: Synthetic oligonucleotide
  Target: LAMA2; (+) strand; PAM type: YTN; PAM sequence: TTT
tcagtggatcaagaaagaga

SEQ ID NO: 406539 - DNA, 20 bp, Artificial Sequence
  Description of Artificial Sequence: Synthetic oligonucleotide
  Target: LAMA2; (+) strand; PAM type: YTN; PAM sequence: TTT
cagtggatcaagaaagagaa

SEQ ID NO: 406540 - DNA, 20 bp, Artificial Sequence
  Description of Artificial Sequence: Synthetic oligonucleotide
  Target: LAMA2; (+) strand; PAM type: YTN; PAM sequence: TTC
agtggatcaagaaagagaac

SEQ ID NO: 406541 - DNA, 20 bp, Artificial Sequence
  Description of Artificial Sequence: Synthetic oligonucleotide
  Target: LAMA2; (+) strand; PAM type: YTN; PAM sequence: CTT
agcttataacaactcagcat

SEQ ID NO: 406542 - DNA, 20 bp, Artificial Sequence
  Description of Artificial Sequence: Synthetic oligonucleotide
  Target: LAMA2; (+) strand; PAM type: YTN; PAM sequence: TTA
gcttataacaactcagcatt

SEQ ID NO: 406543 - DNA, 20 bp, Artificial Sequence
  Description of Artificial Sequence: Synthetic oligonucleotide
  Target: LAMA2; (+) strand; PAM type: YTN; PAM sequence: CTT
ataacaactcagcattgatt

SEQ ID NO: 406544 - DNA, 20 bp, Artificial Sequence
  Description of Artificial Sequence: Synthetic oligonucleotide
  Target: LAMA2; (+) strand; PAM type: YTN; PAM sequence: TTA
taacaactcagcattgatta

SEQ ID NO: 406545 - DNA, 20 bp, Artificial Sequence
  Description of Artificial Sequence: Synthetic oligonucleotide
  Target: LAMA2; (+) strand; PAM type: YTN; PAM sequence: CTC
agcattgattataaaatatt

SEQ ID NO: 406546 - DNA, 20 bp, Artificial Sequence
  Description of Artificial Sequence: Synthetic oligonucleotide
  Target: LAMA2; (+) strand; PAM type: YTN; PAM sequence: TTG
attataaaatatttcttaag

SEQ ID NO: 406547 - DNA, 20 bp, Artificial Sequence
  Description of Artificial Sequence: Synthetic oligonucleotide
  Target: LAMA2; (+) strand; PAM type: YTN; PAM sequence: TTA
taaaatatttcttaagtccc

SEQ ID NO: 406548 - DNA, 20 bp, Artificial Sequence
  Description of Artificial Sequence: Synthetic oligonucleotide
  Target: LAMA2; (+) strand; PAM type: YTN; PAM sequence: TTT
cttaagtccctactctgtgt

SEQ ID NO: 406549 - DNA, 20 bp, Artificial Sequence
  Description of Artificial Sequence: Synthetic oligonucleotide
  Target: LAMA2; (+) strand; PAM type: YTN; PAM sequence: TTC
ttaagtccctactctgtgtc

SEQ ID NO: 406550 - DNA, 20 bp, Artificial Sequence
  Description of Artificial Sequence: Synthetic oligonucleotide
  Target: LAMA2; (+) strand; PAM type: YTN; PAM sequence: CTT
aagtccctactctgtgtcta

SEQ ID NO: 406551 - DNA, 20 bp, Artificial Sequence
  Description of Artificial Sequence: Synthetic oligonucleotide
  Target: LAMA2; (+) strand; PAM type: YTN; PAM sequence: TTA
agtccctactctgtgtctat

SEQ ID NO: 406552 - DNA, 20 bp, Artificial Sequence
  Description of Artificial Sequence: Synthetic oligonucleotide
  Target: LAMA2; (+) strand; PAM type: YTN; PAM sequence: CTA
ctctgtgtctattatttaat

SEQ ID NO: 406553 - DNA, 20 bp, Artificial Sequence
  Description of Artificial Sequence: Synthetic oligonucleotide
  Target: LAMA2; (+) strand; PAM type: YTN; PAM sequence: CTC
tgtgtctattatttaataaa

SEQ ID NO: 406554 - DNA, 20 bp, Artificial Sequence
  Description of Artificial Sequence: Synthetic oligonucleotide
  Target: LAMA2; (+) strand; PAM type: YTN; PAM sequence: CTG
tgtctattatttaataaaat

SEQ ID NO: 406555 - DNA, 20 bp, Artificial Sequence
  Description of Artificial Sequence: Synthetic oligonucleotide
  Target: LAMA2; (+) strand; PAM type: YTN; PAM sequence: CTA
ttatttaataaaatccttat

SEQ ID NO: 406556 - DNA, 20 bp, Artificial Sequence
  Description of Artificial Sequence: Synthetic oligonucleotide
  Target: LAMA2; (+) strand; PAM type: YTN; PAM sequence: TTA
tttaataaaatccttatttc

SEQ ID NO: 406557 - DNA, 20 bp, Artificial Sequence
  Description of Artificial Sequence: Synthetic oligonucleotide
  Target: LAMA2; (+) strand; PAM type: YTN; PAM sequence: TTT
aataaaatccttatttccct

SEQ ID NO: 406558 - DNA, 20 bp, Artificial Sequence
  Description of Artificial Sequence: Synthetic oligonucleotide
  Target: LAMA2; (+) strand; PAM type: YTN; PAM sequence: TTA
ataaaatccttatttcccta

SEQ ID NO: 406559 - DNA, 20 bp, Artificial Sequence
  Description of Artificial Sequence: Synthetic oligonucleotide
  Target: LAMA2; (+) strand; PAM type: YTN; PAM sequence: CTT
atttccctacctacttataa

SEQ ID NO: 406560 - DNA, 20 bp, Artificial Sequence
  Description of Artificial Sequence: Synthetic oligonucleotide
  Target: LAMA2; (+) strand; PAM type: YTN; PAM sequence: TTA
tttccctacctacttataaa

SEQ ID NO: 406561 - DNA, 20 bp, Artificial Sequence
  Description of Artificial Sequence: Synthetic oligonucleotide
  Target: LAMA2; (+) strand; PAM type: YTN; PAM sequence: TTT
ccctacctacttataaatca

SEQ ID NO: 406562 - DNA, 20 bp, Artificial Sequence
  Description of Artificial Sequence: Synthetic oligonucleotide
  Target: LAMA2; (+) strand; PAM type: YTN; PAM sequence: TTC
cctacctacttataaatcac

SEQ ID NO: 406563 - DNA, 20 bp, Artificial Sequence
  Description of Artificial Sequence: Synthetic oligonucleotide
  Target: LAMA2; (+) strand; PAM type: YTN; PAM sequence: CTA
cctacttataaatcacatct

SEQ ID NO: 406564 - DNA, 20 bp, Artificial Sequence
  Description of Artificial Sequence: Synthetic oligonucleotide
  Target: LAMA2; (+) strand; PAM type: YTN; PAM sequence: CTA
cttataaatcacatctgaac

SEQ ID NO: 406565 - DNA, 20 bp, Artificial Sequence
  Description of Artificial Sequence: Synthetic oligonucleotide
  Target: LAMA2; (+) strand; PAM type: YTN; PAM sequence: CTT
ataaatcacatctgaactca

SEQ ID NO: 406566 - DNA, 20 bp, Artificial Sequence
  Description of Artificial Sequence: Synthetic oligonucleotide
  Target: LAMA2; (+) strand; PAM type: YTN; PAM sequence: TTA
taaatcacatctgaactcat

SEQ ID NO: 406567 - DNA, 20 bp, Artificial Sequence
  Description of Artificial Sequence: Synthetic oligonucleotide
  Target: LAMA2; (+) strand; PAM type: YTN; PAM sequence: CTG
aactcatcaactgtgaaatt

SEQ ID NO: 406568 - DNA, 20 bp, Artificial Sequence
  Description of Artificial Sequence: Synthetic oligonucleotide
  Target: LAMA2; (+) strand; PAM type: YTN; PAM sequence: CTC
atcaactgtgaaattttgtg

SEQ ID NO: 406569 - DNA, 20 bp, Artificial Sequence
  Description of Artificial Sequence: Synthetic oligonucleotide
  Target: LAMA2; (+) strand; PAM type: YTN; PAM sequence: CTG
tgaaattttgtgtcaatagc

SEQ ID NO: 406570 - DNA, 20 bp, Artificial Sequence
  Description of Artificial Sequence: Synthetic oligonucleotide
  Target: LAMA2; (+) strand; PAM type: YTN; PAM sequence: TTT
tgtgtcaatagcctactttt

SEQ ID NO: 406571 - DNA, 20 bp, Artificial Sequence
  Description of Artificial Sequence: Synthetic oligonucleotide
  Target: LAMA2; (+) strand; PAM type: YTN; PAM sequence: TTT
gtgtcaatagcctacttttc

SEQ ID NO: 406572 - DNA, 20 bp, Artificial Sequence
  Description of Artificial Sequence: Synthetic oligonucleotide
  Target: LAMA2; (+) strand; PAM type: YTN; PAM sequence: TTG
tgtcaatagcctacttttct

SEQ ID NO: 406573 - DNA, 20 bp, Artificial Sequence
  Description of Artificial Sequence: Synthetic oligonucleotide
  Target: LAMA2; (+) strand; PAM type: YTN; PAM sequence: CTA
cttttctattttgtaaagaa

SEQ ID NO: 406574 - DNA, 20 bp, Artificial Sequence
  Description of Artificial Sequence: Synthetic oligonucleotide
  Target: LAMA2; (+) strand; PAM type: YTN; PAM sequence: CTT
ttctattttgtaaagaaaag

SEQ ID NO: 406575 - DNA, 20 bp, Artificial Sequence
  Description of Artificial Sequence: Synthetic oligonucleotide
  Target: LAMA2; (+) strand; PAM type: YTN; PAM sequence: TTT
tctattttgtaaagaaaaga

SEQ ID NO: 406576 - DNA, 20 bp, Artificial Sequence
  Description of Artificial Sequence: Synthetic oligonucleotide
  Target: LAMA2; (+) strand; PAM type: YTN; PAM sequence: TTT
ctattttgtaaagaaaagaa

SEQ ID NO: 406577 - DNA, 20 bp, Artificial Sequence
  Description of Artificial Sequence: Synthetic oligonucleotide
  Target: LAMA2; (+) strand; PAM type: YTN; PAM sequence: TTC
tattttgtaaagaaaagaaa

SEQ ID NO: 406578 - DNA, 20 bp, Artificial Sequence
  Description of Artificial Sequence: Synthetic oligonucleotide
  Target: LAMA2; (+) strand; PAM type: YTN; PAM sequence: CTA
ttttgtaaagaaaagaaata

SEQ ID NO: 406579 - DNA, 20 bp, Artificial Sequence
  Description of Artificial Sequence: Synthetic oligonucleotide
  Target: LAMA2; (+) strand; PAM type: YTN; PAM sequence: TTT
tgtaaagaaaagaaataggg

SEQ ID NO: 406580 - DNA, 20 bp, Artificial Sequence
  Description of Artificial Sequence: Synthetic oligonucleotide
  Target: LAMA2; (+) strand; PAM type: YTN; PAM sequence: TTT
gtaaagaaaagaaatagggt

SEQ ID NO: 406581 - DNA, 20 bp, Artificial Sequence
  Description of Artificial Sequence: Synthetic oligonucleotide
  Target: LAMA2; (+) strand; PAM type: YTN; PAM sequence: TTG
taaagaaaagaaatagggta

SEQ ID NO: 406582 - DNA, 20 bp, Artificial Sequence
  Description of Artificial Sequence: Synthetic oligonucleotide
  Target: LAMA2; (+) strand; PAM type: YTN; PAM sequence: TTA
gcatttactagcatttcctg

SEQ ID NO: 406583 - DNA, 20 bp, Artificial Sequence
  Description of Artificial Sequence: Synthetic oligonucleotide
  Target: LAMA2; (+) strand; PAM type: YTN; PAM sequence: TTT
actagcatttcctggtagaa

SEQ ID NO: 406584 - DNA, 20 bp, Artificial Sequence
  Description of Artificial Sequence: Synthetic oligonucleotide
  Target: LAMA2; (+) strand; PAM type: YTN; PAM sequence: TTA
ctagcatttcctggtagaac

SEQ ID NO: 406585 - DNA, 20 bp, Artificial Sequence
  Description of Artificial Sequence: Synthetic oligonucleotide
  Target: LAMA2; (+) strand; PAM type: YTN; PAM sequence: CTA
gcatttcctggtagaaccca

SEQ ID NO: 406586 - DNA, 20 bp, Artificial Sequence
  Description of Artificial Sequence: Synthetic oligonucleotide
  Target: LAMA2; (+) strand; PAM type: YTN; PAM sequence: TTT
cctggtagaacccacttcat

SEQ ID NO: 406587 - DNA, 20 bp, Artificial Sequence
  Description of Artificial Sequence: Synthetic oligonucleotide
  Target: LAMA2; (+) strand; PAM type: YTN; PAM sequence: TTC
ctggtagaacccacttcatc

SEQ ID NO: 406588 - DNA, 20 bp, Artificial Sequence
  Description of Artificial Sequence: Synthetic oligonucleotide
  Target: LAMA2; (+) strand; PAM type: YTN; PAM sequence: CTG
gtagaacccacttcatcgct

SEQ ID NO: 406589 - DNA, 20 bp, Artificial Sequence
  Description of Artificial Sequence: Synthetic oligonucleotide
  Target: LAMA2; (+) strand; PAM type: YTN; PAM sequence: CTT
catcgctatcactcatgaag

SEQ ID NO: 406590 - DNA, 20 bp, Artificial Sequence
  Description of Artificial Sequence: Synthetic oligonucleotide
  Target: LAMA2; (+) strand; PAM type: YTN; PAM sequence: TTC
atcgctatcactcatgaagg

SEQ ID NO: 406591 - DNA, 20 bp, Artificial Sequence
  Description of Artificial Sequence: Synthetic oligonucleotide
  Target: LAMA2; (+) strand; PAM type: YTN; PAM sequence: CTA
tcactcatgaaggatagagt

SEQ ID NO: 406592 - DNA, 20 bp, Artificial Sequence
  Description of Artificial Sequence: Synthetic oligonucleotide
  Target: LAMA2; (+) strand; PAM type: YTN; PAM sequence: CTC
atgaaggatagagtaaagca

SEQ ID NO: 406593 - DNA, 20 bp, Artificial Sequence
  Description of Artificial Sequence: Synthetic oligonucleotide
  Target: LAMA2; (+) strand; PAM type: YTN; PAM sequence: CTC
cctttaagtcagtaaaaata

SEQ ID NO: 406594 - DNA, 20 bp, Artificial Sequence
  Description of Artificial Sequence: Synthetic oligonucleotide
  Target: LAMA2; (+) strand; PAM type: YTN; PAM sequence: CTT
taagtcagtaaaaatatgcc

SEQ ID NO: 406595 - DNA, 20 bp, Artificial Sequence
  Description of Artificial Sequence: Synthetic oligonucleotide
  Target: LAMA2; (+) strand; PAM type: YTN; PAM sequence: TTT
aagtcagtaaaaatatgcca

SEQ ID NO: 406596 - DNA, 20 bp, Artificial Sequence
  Description of Artificial Sequence: Synthetic oligonucleotide
  Target: LAMA2; (+) strand; PAM type: YTN; PAM sequence: TTA
agtcagtaaaaatatgccat

SEQ ID NO: 406597 - DNA, 20 bp, Artificial Sequence
  Description of Artificial Sequence: Synthetic oligonucleotide
  Target: LAMA2; (+) strand; PAM type: YTN; PAM sequence: CTG
tctctctgccagttaccttt

SEQ ID NO: 406598 - DNA, 20 bp, Artificial Sequence
  Description of Artificial Sequence: Synthetic oligonucleotide
  Target: LAMA2; (+) strand; PAM type: YTN; PAM sequence: CTC
tctgccagttaccttttggg

SEQ ID NO: 406599 - DNA, 20 bp, Artificial Sequence
  Description of Artificial Sequence: Synthetic oligonucleotide
  Target: LAMA2; (+) strand; PAM type: YTN; PAM sequence: CTC
tgccagttaccttttgggcc

SEQ ID NO: 406600 - DNA, 20 bp, Artificial Sequence
  Description of Artificial Sequence: Synthetic oligonucleotide
  Target: LAMA2; (+) strand; PAM type: YTN; PAM sequence: CTG
ccagttaccttttgggccag

SEQ ID NO: 406601 - DNA, 20 bp, Artificial Sequence
  Description of Artificial Sequence: Synthetic oligonucleotide
  Target: LAMA2; (+) strand; PAM type: YTN; PAM sequence: TTA
ccttttgggccagtgaattt

SEQ ID NO: 406602 - DNA, 20 bp, Artificial Sequence
  Description of Artificial Sequence: Synthetic oligonucleotide
  Target: LAMA2; (+) strand; PAM type: YTN; PAM sequence: CTT
ttgggccagtgaatttcaat

SEQ ID NO: 406603 - DNA, 20 bp, Artificial Sequence
  Description of Artificial Sequence: Synthetic oligonucleotide
  Target: LAMA2; (+) strand; PAM type: YTN; PAM sequence: TTT
tgggccagtgaatttcaatt

SEQ ID NO: 406604 - DNA, 20 bp, Artificial Sequence
  Description of Artificial Sequence: Synthetic oligonucleotide
  Target: LAMA2; (+) strand; PAM type: YTN; PAM sequence: TTT
gggccagtgaatttcaattc

SEQ ID NO: 406605 - DNA, 20 bp, Artificial Sequence
  Description of Artificial Sequence: Synthetic oligonucleotide
  Target: LAMA2; (+) strand; PAM type: YTN; PAM sequence: TTG
ggccagtgaatttcaattca

SEQ ID NO: 406606 - DNA, 20 bp, Artificial Sequence
  Description of Artificial Sequence: Synthetic oligonucleotide
  Target: LAMA2; (+) strand; PAM type: YTN; PAM sequence: TTT
caattcaattgtgttgctgc

SEQ ID NO: 406607 - DNA, 20 bp, Artificial Sequence
  Description of Artificial Sequence: Synthetic oligonucleotide
  Target: LAMA2; (+) strand; PAM type: YTN; PAM sequence: TTC
aattcaattgtgttgctgct

SEQ ID NO: 406608 - DNA, 20 bp, Artificial Sequence
  Description of Artificial Sequence: Synthetic oligonucleotide
  Target: LAMA2; (+) strand; PAM type: YTN; PAM sequence: TTC
aattgtgttgctgctcttta

SEQ ID NO: 406609 - DNA, 20 bp, Artificial Sequence
  Description of Artificial Sequence: Synthetic oligonucleotide
  Target: LAMA2; (+) strand; PAM type: YTN; PAM sequence: TTG
tgttgctgctctttaatcat

SEQ ID NO: 406610 - DNA, 20 bp, Artificial Sequence
  Description of Artificial Sequence: Synthetic oligonucleotide
  Target: LAMA2; (+) strand; PAM type: YTN; PAM sequence: TTG
ctgctctttaatcatgtttt

SEQ ID NO: 406611 - DNA, 20 bp, Artificial Sequence
  Description of Artificial Sequence: Synthetic oligonucleotide
  Target: LAMA2; (+) strand; PAM type: YTN; PAM sequence: CTG
ctctttaatcatgttttctt

SEQ ID NO: 406612 - DNA, 20 bp, Artificial Sequence
  Description of Artificial Sequence: Synthetic oligonucleotide
  Target: LAMA2; (+) strand; PAM type: YTN; PAM sequence: CTC
tttaatcatgttttcttaga

SEQ ID NO: 406613 - DNA, 20 bp, Artificial Sequence
  Description of Artificial Sequence: Synthetic oligonucleotide
  Target: LAMA2; (+) strand; PAM type: YTN; PAM sequence: CTT
taatcatgttttcttagaat

SEQ ID NO: 406614 - DNA, 20 bp, Artificial Sequence
  Description of Artificial Sequence: Synthetic oligonucleotide
  Target: LAMA2; (+) strand; PAM type: YTN; PAM sequence: TTT
aatcatgttttcttagaatg

SEQ ID NO: 406615 - DNA, 20 bp, Artificial Sequence
  Description of Artificial Sequence: Synthetic oligonucleotide
  Target: LAMA2; (+) strand; PAM type: YTN; PAM sequence: TTA
atcatgttttcttagaatga

SEQ ID NO: 406616 - DNA, 20 bp, Artificial Sequence
  Description of Artificial Sequence: Synthetic oligonucleotide
  Target: LAMA2; (+) strand; PAM type: YTN; PAM sequence: TTT
tcttagaatgatttctaaaa

SEQ ID NO: 406617 - DNA, 20 bp, Artificial Sequence
  Description of Artificial Sequence: Synthetic oligonucleotide
  Target: LAMA2; (+) strand; PAM type: YTN; PAM sequence: TTT
cttagaatgatttctaaaaa

SEQ ID NO: 406618 - DNA, 20 bp, Artificial Sequence
  Description of Artificial Sequence: Synthetic oligonucleotide
  Target: LAMA2; (+) strand; PAM type: YTN; PAM sequence: TTC
ttagaatgatttctaaaaat

SEQ ID NO: 406619 - DNA, 20 bp, Artificial Sequence
  Description of Artificial Sequence: Synthetic oligonucleotide
  Target: LAMA2; (+) strand; PAM type: YTN; PAM sequence: CTT
agaatgatttctaaaaatgc

SEQ ID NO: 406620 - DNA, 20 bp, Artificial Sequence
  Description of Artificial Sequence: Synthetic oligonucleotide
  Target: LAMA2; (+) strand; PAM type: YTN; PAM sequence: TTA
gaatgatttctaaaaatgca

SEQ ID NO: 406621 - DNA, 20 bp, Artificial Sequence
  Description of Artificial Sequence: Synthetic oligonucleotide
  Target: LAMA2; (+) strand; PAM type: YTN; PAM sequence: TTT
ctaaaaatgcatatattcat

SEQ ID NO: 406622 - DNA, 20 bp, Artificial Sequence
  Description of Artificial Sequence: Synthetic oligonucleotide
  Target: LAMA2; (+) strand; PAM type: YTN; PAM sequence: TTC
taaaaatgcatatattcatt

SEQ ID NO: 406623 - DNA, 20 bp, Artificial Sequence
  Description of Artificial Sequence: Synthetic oligonucleotide
  Target: LAMA2; (+) strand; PAM type: YTN; PAM sequence: CTA
aaaatgcatatattcattca

SEQ ID NO: 406624 - DNA, 20 bp, Artificial Sequence
  Description of Artificial Sequence: Synthetic oligonucleotide
  Target: LAMA2; (+) strand; PAM type: YTN; PAM sequence: TTC
attcatggataaggaggaaa

SEQ ID NO: 406625 - DNA, 20 bp, Artificial Sequence
  Description of Artificial Sequence: Synthetic oligonucleotide
  Target: LAMA2; (+) strand; PAM type: YTN; PAM sequence: TTC
atggataaggaggaaaacca

SEQ ID NO: 406626 - DNA, 20 bp, Artificial Sequence
  Description of Artificial Sequence: Synthetic oligonucleotide
  Target: LAMA2; (+) strand; PAM type: YTN; PAM sequence: CTC
cagtcactggcttgcctgtg

SEQ ID NO: 406627 - DNA, 20 bp, Artificial Sequence
  Description of Artificial Sequence: Synthetic oligonucleotide
  Target: LAMA2; (+) strand; PAM type: YTN; PAM sequence: CTG
gcttgcctgtgatagagagg

SEQ ID NO: 406628 - DNA, 20 bp, Artificial Sequence
  Description of Artificial Sequence: Synthetic oligonucleotide
  Target: LAMA2; (+) strand; PAM type: YTN; PAM sequence: CTT
gcctgtgatagagaggcaga

SEQ ID NO: 406629 - DNA, 20 bp, Artificial Sequence
  Description of Artificial Sequence: Synthetic oligonucleotide
  Target: LAMA2; (+) strand; PAM type: YTN; PAM sequence: TTG
cctgtgatagagaggcagaa

SEQ ID NO: 406630 - DNA, 20 bp, Artificial Sequence
  Description of Artificial Sequence: Synthetic oligonucleotide
  Target: LAMA2; (+) strand; PAM type: YTN; PAM sequence: CTG
tgatagagaggcagaatctc

SEQ ID NO: 406631 - DNA, 20 bp, Artificial Sequence
  Description of Artificial Sequence: Synthetic oligonucleotide
  Target: LAMA2; (+) strand; PAM type: YTN; PAM sequence: CTC
attttcagacaccattaaaa

SEQ ID NO: 406632 - DNA, 20 bp, Artificial Sequence
  Description of Artificial Sequence: Synthetic oligonucleotide
  Target: LAMA2; (+) strand; PAM type: YTN; PAM sequence: TTT
tcagacaccattaaaatacc

SEQ ID NO: 406633 - DNA, 20 bp, Artificial Sequence
  Description of Artificial Sequence: Synthetic oligonucleotide
  Target: LAMA2; (+) strand; PAM type: YTN; PAM sequence: TTT
cagacaccattaaaataccc

SEQ ID NO: 406634 - DNA, 20 bp, Artificial Sequence
  Description of Artificial Sequence: Synthetic oligonucleotide
  Target: LAMA2; (+) strand; PAM type: YTN; PAM sequence: TTC
agacaccattaaaataccca

SEQ ID NO: 406635 - DNA, 20 bp, Artificial Sequence
  Description of Artificial Sequence: Synthetic oligonucleotide
  Target: LAMA2; (+) strand; PAM type: YTN; PAM sequence: TTA
aaatacccaccaagtctgta

SEQ ID NO: 406636 - DNA, 20 bp, Artificial Sequence
  Description of Artificial Sequence: Synthetic oligonucleotide
  Target: LAMA2; (+) strand; PAM type: YTN; PAM sequence: CTG
tagaaagagactattttcat

SEQ ID NO: 406637 - DNA, 20 bp, Artificial Sequence
  Description of Artificial Sequence: Synthetic oligonucleotide
  Target: LAMA2; (+) strand; PAM type: YTN; PAM sequence: CTA
ttttcatcttccagtcaaca

SEQ ID NO: 406638 - DNA, 20 bp, Artificial Sequence
  Description of Artificial Sequence: Synthetic oligonucleotide
  Target: LAMA2; (+) strand; PAM type: YTN; PAM sequence: TTT
tcatcttccagtcaacagcc

SEQ ID NO: 406639 - DNA, 20 bp, Artificial Sequence
  Description of Artificial Sequence: Synthetic oligonucleotide
  Target: LAMA2; (+) strand; PAM type: YTN; PAM sequence: TTT
catcttccagtcaacagccc

SEQ ID NO: 406640 - DNA, 20 bp, Artificial Sequence
  Description of Artificial Sequence: Synthetic oligonucleotide
  Target: LAMA2; (+) strand; PAM type: YTN; PAM sequence: TTC
atcttccagtcaacagcccc

SEQ ID NO: 406641 - DNA, 20 bp, Artificial Sequence
  Description of Artificial Sequence: Synthetic oligonucleotide
  Target: LAMA2; (+) strand; PAM type: YTN; PAM sequence: CTT
ccagtcaacagccccatatg

SEQ ID NO: 406642 - DNA, 20 bp, Artificial Sequence
  Description of Artificial Sequence: Synthetic oligonucleotide
  Target: LAMA2; (+) strand; PAM type: YTN; PAM sequence: TTC
cagtcaacagccccatatga

SEQ ID NO: 406643 - DNA, 20 bp, Artificial Sequence
  Description of Artificial Sequence: Synthetic oligonucleotide
  Target: LAMA2; (+) strand; PAM type: YTN; PAM sequence: CTT
tgccgatctagataaaaagg

SEQ ID NO: 406644 - DNA, 20 bp, Artificial Sequence
  Description of Artificial Sequence: Synthetic oligonucleotide
  Target: LAMA2; (+) strand; PAM type: YTN; PAM sequence: TTT
gccgatctagataaaaagga

SEQ ID NO: 406645 - DNA, 20 bp, Artificial Sequence
  Description of Artificial Sequence: Synthetic oligonucleotide
  Target: LAMA2; (+) strand; PAM type: YTN; PAM sequence: TTG
ccgatctagataaaaaggaa

SEQ ID NO: 406646 - DNA, 20 bp, Artificial Sequence
  Description of Artificial Sequence: Synthetic oligonucleotide
  Target: LAMA2; (+) strand; PAM type: YTN; PAM sequence: CTA
gataaaaaggaatgtatatg

SEQ ID NO: 406647 - DNA, 20 bp, Artificial Sequence
  Description of Artificial Sequence: Synthetic oligonucleotide
  Target: LAMA2; (+) strand; PAM type: YTN; PAM sequence: CTT
gaaaacagttttataaatct

SEQ ID NO: 406648 - DNA, 20 bp, Artificial Sequence
  Description of Artificial Sequence: Synthetic oligonucleotide
  Target: LAMA2; (+) strand; PAM type: YTN; PAM sequence: TTG
aaaacagttttataaatcta

SEQ ID NO: 406649 - DNA, 20 bp, Artificial Sequence
  Description of Artificial Sequence: Synthetic oligonucleotide
  Target: LAMA2; (+) strand; PAM type: YTN; PAM sequence: TTT
tataaatctattttctttta

SEQ ID NO: 406650 - DNA, 20 bp, Artificial Sequence
  Description of Artificial Sequence: Synthetic oligonucleotide
  Target: LAMA2; (+) strand; PAM type: YTN; PAM sequence: TTT
ataaatctattttcttttag

SEQ ID NO: 406651 - DNA, 20 bp, Artificial Sequence
  Description of Artificial Sequence: Synthetic oligonucleotide
  Target: LAMA2; (+) strand; PAM type: YTN; PAM sequence: TTA
taaatctattttcttttagc

SEQ ID NO: 406652 - DNA, 20 bp, Artificial Sequence
  Description of Artificial Sequence: Synthetic oligonucleotide
  Target: LAMA2; (+) strand; PAM type: YTN; PAM sequence: CTA
ttttcttttagcccccagtc

SEQ ID NO: 406653 - DNA, 20 bp, Artificial Sequence
  Description of Artificial Sequence: Synthetic oligonucleotide
  Target: LAMA2; (+) strand; PAM type: YTN; PAM sequence: TTT
tcttttagcccccagtccag

SEQ ID NO: 406654 - DNA, 20 bp, Artificial Sequence
  Description of Artificial Sequence: Synthetic oligonucleotide
  Target: LAMA2; (+) strand; PAM type: YTN; PAM sequence: TTT
cttttagcccccagtccagt

SEQ ID NO: 406655 - DNA, 20 bp, Artificial Sequence
  Description of Artificial Sequence: Synthetic oligonucleotide
  Target: LAMA2; (+) strand; PAM type: YTN; PAM sequence: TTC
ttttagcccccagtccagtc

SEQ ID NO: 406656 - DNA, 20 bp, Artificial Sequence
  Description of Artificial Sequence: Synthetic oligonucleotide
  Target: LAMA2; (+) strand; PAM type: YTN; PAM sequence: CTT
ttagcccccagtccagtcaa

SEQ ID NO: 406657 - DNA, 20 bp, Artificial Sequence
  Description of Artificial Sequence: Synthetic oligonucleotide
  Target: LAMA2; (+) strand; PAM type: YTN; PAM sequence: TTT
tagcccccagtccagtcaag

SEQ ID NO: 406658 - DNA, 20 bp, Artificial Sequence
  Description of Artificial Sequence: Synthetic oligonucleotide
  Target: LAMA2; (+) strand; PAM type: YTN; PAM sequence: TTT
agcccccagtccagtcaagg

SEQ ID NO: 406659 - DNA, 20 bp, Artificial Sequence
  Description of Artificial Sequence: Synthetic oligonucleotide
  Target: LAMA2; (+) strand; PAM type: YTN; PAM sequence: TTA
gcccccagtccagtcaagga

SEQ ID NO: 406660 - DNA, 20 bp, Artificial Sequence
  Description of Artificial Sequence: Synthetic oligonucleotide
  Target: LAMA2; (+) strand; PAM type: YTN; PAM sequence: CTA
attatgtatataaaaataat

SEQ ID NO: 406661 - DNA, 20 bp, Artificial Sequence
  Description of Artificial Sequence: Synthetic oligonucleotide
  Target: LAMA2; (+) strand; PAM type: YTN; PAM sequence: TTA
tgtatataaaaataataaaa

SEQ ID NO: 406662 - DNA, 20 bp, Artificial Sequence
  Description of Artificial Sequence: Synthetic oligonucleotide
  Target: LAMA2; (+) strand; PAM type: YTN; PAM sequence: TTC
aattttaaaatcttaacttg

SEQ ID NO: 406663 - DNA, 20 bp, Artificial Sequence
  Description of Artificial Sequence: Synthetic oligonucleotide
  Target: LAMA2; (+) strand; PAM type: YTN; PAM sequence: TTT
taaaatcttaacttgctagc

SEQ ID NO: 406664 - DNA, 20 bp, Artificial Sequence
  Description of Artificial Sequence: Synthetic oligonucleotide
  Target: LAMA2; (+) strand; PAM type: YTN; PAM sequence: TTT
aaaatcttaacttgctagct

SEQ ID NO: 406665 - DNA, 20 bp, Artificial Sequence
  Description of Artificial Sequence: Synthetic oligonucleotide
  Target: LAMA2; (+) strand; PAM type: YTN; PAM sequence: TTA
aaatcttaacttgctagcta

SEQ ID NO: 406666 - DNA, 20 bp, Artificial Sequence
  Description of Artificial Sequence: Synthetic oligonucleotide
  Target: LAMA2; (+) strand; PAM type: YTN; PAM sequence: CTT
aacttgctagctatatttaa

SEQ ID NO: 406667 - DNA, 20 bp, Artificial Sequence
  Description of Artificial Sequence: Synthetic oligonucleotide
  Target: LAMA2; (+) strand; PAM type: YTN; PAM sequence: TTA
acttgctagctatatttaat

SEQ ID NO: 406668 - DNA, 20 bp, Artificial Sequence
  Description of Artificial Sequence: Synthetic oligonucleotide
  Target: LAMA2; (+) strand; PAM type: YTN; PAM sequence: CTT
gctagctatatttaatagga

SEQ ID NO: 406669 - DNA, 20 bp, Artificial Sequence
  Description of Artificial Sequence: Synthetic oligonucleotide
  Target: LAMA2; (+) strand; PAM type: YTN; PAM sequence: TTG
ctagctatatttaataggac

SEQ ID NO: 406670 - DNA, 20 bp, Artificial Sequence
  Description of Artificial Sequence: Synthetic oligonucleotide
  Target: LAMA2; (+) strand; PAM type: YTN; PAM sequence: CTA
gctatatttaataggacaat

SEQ ID NO: 406671 - DNA, 20 bp, Artificial Sequence
  Description of Artificial Sequence: Synthetic oligonucleotide
  Target: LAMA2; (+) strand; PAM type: YTN; PAM sequence: CTA
tatttaataggacaattatt

SEQ ID NO: 406672 - DNA, 20 bp, Artificial Sequence
  Description of Artificial Sequence: Synthetic oligonucleotide
  Target: LAMA2; (+) strand; PAM type: YTN; PAM sequence: TTT
aataggacaattattctttt

SEQ ID NO: 406673 - DNA, 20 bp, Artificial Sequence
  Description of Artificial Sequence: Synthetic oligonucleotide
  Target: LAMA2; (+) strand; PAM type: YTN; PAM sequence: TTA
ataggacaattattctttta

SEQ ID NO: 406674 - DNA, 20 bp, Artificial Sequence
  Description of Artificial Sequence: Synthetic oligonucleotide
  Target: LAMA2; (+) strand; PAM type: YTN; PAM sequence: TTA
ttcttttaggtatttttctt

SEQ ID NO: 406675 - DNA, 20 bp, Artificial Sequence
  Description of Artificial Sequence: Synthetic oligonucleotide
  Target: LAMA2; (+) strand; PAM type: YTN; PAM sequence: TTC
ttttaggtatttttcttgtt

SEQ ID NO: 406676 - DNA, 20 bp, Artificial Sequence
  Description of Artificial Sequence: Synthetic oligonucleotide
  Target: LAMA2; (+) strand; PAM type: YTN; PAM sequence: CTT
ttaggtatttttcttgtttg

SEQ ID NO: 406677 - DNA, 20 bp, Artificial Sequence
  Description of Artificial Sequence: Synthetic oligonucleotide
  Target: LAMA2; (+) strand; PAM type: YTN; PAM sequence: TTT
taggtatttttcttgtttgt

SEQ ID NO: 406678 - DNA, 20 bp, Artificial Sequence
  Description of Artificial Sequence: Synthetic oligonucleotide
  Target: LAMA2; (+) strand; PAM type: YTN; PAM sequence: TTT
aggtatttttcttgtttgtt

SEQ ID NO: 406679 - DNA, 20 bp, Artificial Sequence
  Description of Artificial Sequence: Synthetic oligonucleotide
  Target: LAMA2; (+) strand; PAM type: YTN; PAM sequence: TTA
ggtatttttcttgtttgttt

SEQ ID NO: 406680 - DNA, 20 bp, Artificial Sequence
  Description of Artificial Sequence: Synthetic oligonucleotide
  Target: LAMA2; (+) strand; PAM type: YTN; PAM sequence: TTT
ttcttgtttgtttttacaaa

SEQ ID NO: 406681 - DNA, 20 bp, Artificial Sequence
  Description of Artificial Sequence: Synthetic oligonucleotide
  Target: LAMA2; (+) strand; PAM type: YTN; PAM sequence: TTT
tcttgtttgtttttacaaaa

SEQ ID NO: 406682 - DNA, 20 bp, Artificial Sequence
  Description of Artificial Sequence: Synthetic oligonucleotide
  Target: LAMA2; (+) strand; PAM type: YTN; PAM sequence: TTT
cttgtttgtttttacaaaag

SEQ ID NO: 406683 - DNA, 20 bp, Artificial Sequence
  Description of Artificial Sequence: Synthetic oligonucleotide
  Target: LAMA2; (+) strand; PAM type: YTN; PAM sequence: TTC
ttgtttgtttttacaaaagt

SEQ ID NO: 406684 - DNA, 20 bp, Artificial Sequence
  Description of Artificial Sequence: Synthetic oligonucleotide
  Target: LAMA2; (+) strand; PAM type: YTN; PAM sequence: CTT
gtttgtttttacaaaagtct

SEQ ID NO: 406685 - DNA, 20 bp, Artificial Sequence
  Description of Artificial Sequence: Synthetic oligonucleotide
  Target: LAMA2; (+) strand; PAM type: YTN; PAM sequence: TTG
tttgtttttacaaaagtctg

SEQ ID NO: 406686 - DNA, 20 bp, Artificial Sequence
  Description of Artificial Sequence: Synthetic oligonucleotide
  Target: LAMA2; (+) strand; PAM type: YTN; PAM sequence: TTT
gtttttacaaaagtctggtt

SEQ ID NO: 406687 - DNA, 20 bp, Artificial Sequence
  Description of Artificial Sequence: Synthetic oligonucleotide
  Target: LAMA2; (+) strand; PAM type: YTN; PAM sequence: TTG
tttttacaaaagtctggttt

SEQ ID NO: 406688 - DNA, 20 bp, Artificial Sequence
  Description of Artificial Sequence: Synthetic oligonucleotide
  Target: LAMA2; (+) strand; PAM type: YTN; PAM sequence: TTT
ttacaaaagtctggtttgag

SEQ ID NO: 406689 - DNA, 20 bp, Artificial Sequence
  Description of Artificial Sequence: Synthetic oligonucleotide
  Target: LAMA2; (+) strand; PAM type: YTN; PAM sequence: TTT
tacaaaagtctggtttgagg

SEQ ID NO: 406690 - DNA, 20 bp, Artificial Sequence
  Description of Artificial Sequence: Synthetic oligonucleotide
  Target: LAMA2; (+) strand; PAM type: YTN; PAM sequence: TTT
acaaaagtctggtttgaggt

SEQ ID NO: 406691 - DNA, 20 bp, Artificial Sequence
  Description of Artificial Sequence: Synthetic oligonucleotide
  Target: LAMA2; (+) strand; PAM type: YTN; PAM sequence: TTA
caaaagtctggtttgaggtg

SEQ ID NO: 406692 - DNA, 20 bp, Artificial Sequence
  Description of Artificial Sequence: Synthetic oligonucleotide
  Target: LAMA2; (+) strand; PAM type: YTN; PAM sequence: CTG
gtttgaggtgtccattggta

SEQ ID NO: 406693 - DNA, 20 bp, Artificial Sequence
  Description of Artificial Sequence: Synthetic oligonucleotide
  Target: LAMA2; (+) strand; PAM type: YTN; PAM sequence: TTT
gaggtgtccattggtatgtg

SEQ ID NO: 406694 - DNA, 20 bp, Artificial Sequence
  Description of Artificial Sequence: Synthetic oligonucleotide
  Target: LAMA2; (+) strand; PAM type: YTN; PAM sequence: TTG
aggtgtccattggtatgtgt

SEQ ID NO: 406695 - DNA, 20 bp, Artificial Sequence
  Description of Artificial Sequence: Synthetic oligonucleotide
  Target: LAMA2; (+) strand; PAM type: YTN; PAM sequence: TTG
gtatgtgtattttagtcctt

SEQ ID NO: 406696 - DNA, 20 bp, Artificial Sequence
  Description of Artificial Sequence: Synthetic oligonucleotide
  Target: LAMA2; (+) strand; PAM type: YTN; PAM sequence: TTT
tagtccttttttaataaggc

SEQ ID NO: 406697 - DNA, 20 bp, Artificial Sequence
  Description of Artificial Sequence: Synthetic oligonucleotide
  Target: LAMA2; (+) strand; PAM type: YTN; PAM sequence: TTT
agtccttttttaataaggca

SEQ ID NO: 406698 - DNA, 20 bp, Artificial Sequence
  Description of Artificial Sequence: Synthetic oligonucleotide
  Target: LAMA2; (+) strand; PAM type: YTN; PAM sequence: TTA
gtccttttttaataaggcaa

SEQ ID NO: 406699 - DNA, 20 bp, Artificial Sequence
  Description of Artificial Sequence: Synthetic oligonucleotide
  Target: LAMA2; (+) strand; PAM type: YTN; PAM sequence: CTT
ttttaataaggcaattgtgt

SEQ ID NO: 406700 - DNA, 20 bp, Artificial Sequence
  Description of Artificial Sequence: Synthetic oligonucleotide
  Target: LAMA2; (+) strand; PAM type: YTN; PAM sequence: TTT
tttaataaggcaattgtgtt

SEQ ID NO: 406701 - DNA, 20 bp, Artificial Sequence
  Description of Artificial Sequence: Synthetic oligonucleotide
  Target: LAMA2; (+) strand; PAM type: YTN; PAM sequence: TTT
ttaataaggcaattgtgttt

SEQ ID NO: 406702 - DNA, 20 bp, Artificial Sequence
  Description of Artificial Sequence: Synthetic oligonucleotide
  Target: LAMA2; (+) strand; PAM type: YTN; PAM sequence: TTT
taataaggcaattgtgtttg

SEQ ID NO: 406703 - DNA, 20 bp, Artificial Sequence
  Description of Artificial Sequence: Synthetic oligonucleotide
  Target: LAMA2; (+) strand; PAM type: YTN; PAM sequence: TTT
aataaggcaattgtgtttga

SEQ ID NO: 406704 - DNA, 20 bp, Artificial Sequence
  Description of Artificial Sequence: Synthetic oligonucleotide
  Target: LAMA2; (+) strand; PAM type: YTN; PAM sequence: TTA
ataaggcaattgtgtttgat

SEQ ID NO: 406705 - DNA, 20 bp, Artificial Sequence
  Description of Artificial Sequence: Synthetic oligonucleotide
  Target: LAMA2; (+) strand; PAM type: YTN; PAM sequence: TTG
tgtttgattttattgaagac

SEQ ID NO: 406706 - DNA, 20 bp, Artificial Sequence
  Description of Artificial Sequence: Synthetic oligonucleotide
  Target: LAMA2; (+) strand; PAM type: YTN; PAM sequence: TTT
gattttattgaagacacatc

SEQ ID NO: 406707 - DNA, 20 bp, Artificial Sequence
  Description of Artificial Sequence: Synthetic oligonucleotide
  Target: LAMA2; (+) strand; PAM type: YTN; PAM sequence: TTG
attttattgaagacacatct

SEQ ID NO: 406708 - DNA, 20 bp, Artificial Sequence
  Description of Artificial Sequence: Synthetic oligonucleotide
  Target: LAMA2; (+) strand; PAM type: YTN; PAM sequence: TTT
tattgaagacacatcttttt

SEQ ID NO: 406709 - DNA, 20 bp, Artificial Sequence
  Description of Artificial Sequence: Synthetic oligonucleotide
  Target: LAMA2; (+) strand; PAM type: YTN; PAM sequence: TTT
attgaagacacatctttttg

SEQ ID NO: 406710 - DNA, 20 bp, Artificial Sequence
  Description of Artificial Sequence: Synthetic oligonucleotide
  Target: LAMA2; (+) strand; PAM type: YTN; PAM sequence: TTA
ttgaagacacatctttttga

SEQ ID NO: 406711 - DNA, 20 bp, Artificial Sequence
  Description of Artificial Sequence: Synthetic oligonucleotide
  Target: LAMA2; (+) strand; PAM type: YTN; PAM sequence: TTG
aagacacatctttttgaaat

SEQ ID NO: 406712 - DNA, 20 bp, Artificial Sequence
  Description of Artificial Sequence: Synthetic oligonucleotide
  Target: LAMA2; (+) strand; PAM type: YTN; PAM sequence: CTT
tttgaaatgatagggctata

SEQ ID NO: 406713 - DNA, 20 bp, Artificial Sequence
  Description of Artificial Sequence: Synthetic oligonucleotide
  Target: LAMA2; (+) strand; PAM type: YTN; PAM sequence: TTT
ttgaaatgatagggctataa

SEQ ID NO: 406714 - DNA, 20 bp, Artificial Sequence
  Description of Artificial Sequence: Synthetic oligonucleotide
  Target: LAMA2; (+) strand; PAM type: YTN; PAM sequence: TTT
tgaaatgatagggctataaa

SEQ ID NO: 406715 - DNA, 20 bp, Artificial Sequence
  Description of Artificial Sequence: Synthetic oligonucleotide
  Target: LAMA2; (+) strand; PAM type: YTN; PAM sequence: TTT
gaaatgatagggctataaac

SEQ ID NO: 406716 - DNA, 20 bp, Artificial Sequence
  Description of Artificial Sequence: Synthetic oligonucleotide
  Target: LAMA2; (+) strand; PAM type: YTN; PAM sequence: TTG
aaatgatagggctataaact

SEQ ID NO: 406717 - DNA, 20 bp, Artificial Sequence
  Description of Artificial Sequence: Synthetic oligonucleotide
  Target: LAMA2; (+) strand; PAM type: YTN; PAM sequence: CTA
taaacttcaagggaattttg

SEQ ID NO: 406718 - DNA, 20 bp, Artificial Sequence
  Description of Artificial Sequence: Synthetic oligonucleotide
  Target: LAMA2; (+) strand; PAM type: YTN; PAM sequence: CTT
caagggaattttggaatttg

SEQ ID NO: 406719 - DNA, 20 bp, Artificial Sequence
  Description of Artificial Sequence: Synthetic oligonucleotide
  Target: LAMA2; (+) strand; PAM type: YTN; PAM sequence: TTC
aagggaattttggaatttga

SEQ ID NO: 406720 - DNA, 20 bp, Artificial Sequence
  Description of Artificial Sequence: Synthetic oligonucleotide
  Target: LAMA2; (+) strand; PAM type: YTN; PAM sequence: TTT
tggaatttgatgtttctctc

SEQ ID NO: 406721 - DNA, 20 bp, Artificial Sequence
  Description of Artificial Sequence: Synthetic oligonucleotide
  Target: LAMA2; (+) strand; PAM type: YTN; PAM sequence: TTT
ggaatttgatgtttctctct

SEQ ID NO: 406722 - DNA, 20 bp, Artificial Sequence
  Description of Artificial Sequence: Synthetic oligonucleotide
  Target: LAMA2; (+) strand; PAM type: YTN; PAM sequence: TTG
gaatttgatgtttctctctg

SEQ ID NO: 406723 - DNA, 20 bp, Artificial Sequence
  Description of Artificial Sequence: Synthetic oligonucleotide
  Target: LAMA2; (+) strand; PAM type: YTN; PAM sequence: TTT
gatgtttctctctgttttcc

SEQ ID NO: 406724 - DNA, 20 bp, Artificial Sequence
  Description of Artificial Sequence: Synthetic oligonucleotide
  Target: LAMA2; (+) strand; PAM type: YTN; PAM sequence: TTG
atgtttctctctgttttcca

SEQ ID NO: 406725 - DNA, 20 bp, Artificial Sequence
  Description of Artificial Sequence: Synthetic oligonucleotide
  Target: LAMA2; (+) strand; PAM type: YTN; PAM sequence: TTT
ctctctgttttccaaagaac

SEQ ID NO: 406726 - DNA, 20 bp, Artificial Sequence
  Description of Artificial Sequence: Synthetic oligonucleotide
  Target: LAMA2; (+) strand; PAM type: YTN; PAM sequence: TTC
tctctgttttccaaagaaca

SEQ ID NO: 406727 - DNA, 20 bp, Artificial Sequence
  Description of Artificial Sequence: Synthetic oligonucleotide
  Target: LAMA2; (+) strand; PAM type: YTN; PAM sequence: CTC
tctgttttccaaagaacact

SEQ ID NO: 406728 - DNA, 20 bp, Artificial Sequence
  Description of Artificial Sequence: Synthetic oligonucleotide
  Target: LAMA2; (+) strand; PAM type: YTN; PAM sequence: CTC
tgttttccaaagaacactga

SEQ ID NO: 406729 - DNA, 20 bp, Artificial Sequence
  Description of Artificial Sequence: Synthetic oligonucleotide
  Target: LAMA2; (+) strand; PAM type: YTN; PAM sequence: CTG
ttttccaaagaacactgatt

SEQ ID NO: 406730 - DNA, 20 bp, Artificial Sequence
  Description of Artificial Sequence: Synthetic oligonucleotide
  Target: LAMA2; (+) strand; PAM type: YTN; PAM sequence: TTT
tccaaagaacactgattctg

SEQ ID NO: 406731 - DNA, 20 bp, Artificial Sequence
  Description of Artificial Sequence: Synthetic oligonucleotide
  Target: LAMA2; (+) strand; PAM type: YTN; PAM sequence: TTT
ccaaagaacactgattctga

SEQ ID NO: 406732 - DNA, 20 bp, Artificial Sequence
  Description of Artificial Sequence: Synthetic oligonucleotide
  Target: LAMA2; (+) strand; PAM type: YTN; PAM sequence: TTC
caaagaacactgattctgaa

SEQ ID NO: 406733 - DNA, 20 bp, Artificial Sequence
  Description of Artificial Sequence: Synthetic oligonucleotide
  Target: LAMA2; (+) strand; PAM type: YTN; PAM sequence: CTG
attctgaaagatgatgagtt

SEQ ID NO: 406734 - DNA, 20 bp, Artificial Sequence
  Description of Artificial Sequence: Synthetic oligonucleotide
  Target: LAMA2; (+) strand; PAM type: YTN; PAM sequence: TTC
tgaaagatgatgagttgagt

SEQ ID NO: 406735 - DNA, 20 bp, Artificial Sequence
  Description of Artificial Sequence: Synthetic oligonucleotide
  Target: LAMA2; (+) strand; PAM type: YTN; PAM sequence: CTG
aaagatgatgagttgagtga

SEQ ID NO: 406736 - DNA, 20 bp, Artificial Sequence
  Description of Artificial Sequence: Synthetic oligonucleotide
  Target: LAMA2; (+) strand; PAM type: YTN; PAM sequence: TTG
agtgaaaataatagtatttc

SEQ ID NO: 406737 - DNA, 20 bp, Artificial Sequence
  Description of Artificial Sequence: Synthetic oligonucleotide
  Target: LAMA2; (+) strand; PAM type: YTN; PAM sequence: TTT
cgtggtcaaataaatttggg

SEQ ID NO: 406738 - DNA, 20 bp, Artificial Sequence
  Description of Artificial Sequence: Synthetic oligonucleotide
  Target: LAMA2; (+) strand; PAM type: YTN; PAM sequence: TTC
gtggtcaaataaatttggga

SEQ ID NO: 406739 - DNA, 20 bp, Artificial Sequence
  Description of Artificial Sequence: Synthetic oligonucleotide
  Target: LAMA2; (+) strand; PAM type: YTN; PAM sequence: TTT
gggaaatactttttgctcta

SEQ ID NO: 406740 - DNA, 20 bp, Artificial Sequence
  Description of Artificial Sequence: Synthetic oligonucleotide
  Target: LAMA2; (+) strand; PAM type: YTN; PAM sequence: TTG
ggaaatactttttgctctat

SEQ ID NO: 406741 - DNA, 20 bp, Artificial Sequence
  Description of Artificial Sequence: Synthetic oligonucleotide
  Target: LAMA2; (+) strand; PAM type: YTN; PAM sequence: CTT
tttgctctatgtccttctct

SEQ ID NO: 406742 - DNA, 20 bp, Artificial Sequence
  Description of Artificial Sequence: Synthetic oligonucleotide
  Target: LAMA2; (+) strand; PAM type: YTN; PAM sequence: TTT
ttgctctatgtccttctcta

SEQ ID NO: 406743 - DNA, 20 bp, Artificial Sequence
  Description of Artificial Sequence: Synthetic oligonucleotide
  Target: LAMA2; (+) strand; PAM type: YTN; PAM sequence: TTT
tgctctatgtccttctctag

SEQ ID NO: 406744 - DNA, 20 bp, Artificial Sequence
  Description of Artificial Sequence: Synthetic oligonucleotide
  Target: LAMA2; (+) strand; PAM type: YTN; PAM sequence: TTT
gctctatgtccttctctagg

SEQ ID NO: 406745 - DNA, 20 bp, Artificial Sequence
  Description of Artificial Sequence: Synthetic oligonucleotide
  Target: LAMA2; (+) strand; PAM type: YTN; PAM sequence: TTG
ctctatgtccttctctagga

SEQ ID NO: 406746 - DNA, 20 bp, Artificial Sequence
  Description of Artificial Sequence: Synthetic oligonucleotide
  Target: LAMA2; (+) strand; PAM type: YTN; PAM sequence: CTC
tatgtccttctctaggaaca

SEQ ID NO: 406747 - DNA, 20 bp, Artificial Sequence
  Description of Artificial Sequence: Synthetic oligonucleotide
  Target: LAMA2; (+) strand; PAM type: YTN; PAM sequence: CTA
tgtccttctctaggaacatt

SEQ ID NO: 406748 - DNA, 20 bp, Artificial Sequence
  Description of Artificial Sequence: Synthetic oligonucleotide
  Target: LAMA2; (+) strand; PAM type: YTN; PAM sequence: CTT
ctctaggaacattgcattgc

SEQ ID NO: 406749 - DNA, 20 bp, Artificial Sequence
  Description of Artificial Sequence: Synthetic oligonucleotide
  Target: LAMA2; (+) strand; PAM type: YTN; PAM sequence: TTC
tctaggaacattgcattgca

SEQ ID NO: 406750 - DNA, 20 bp, Artificial Sequence
  Description of Artificial Sequence: Synthetic oligonucleotide
  Target: LAMA2; (+) strand; PAM type: YTN; PAM sequence: CTC
taggaacattgcattgcata

SEQ ID NO: 406751 - DNA, 20 bp, Artificial Sequence
  Description of Artificial Sequence: Synthetic oligonucleotide
  Target: LAMA2; (+) strand; PAM type: YTN; PAM sequence: CTA
ggaacattgcattgcatatt

SEQ ID NO: 406752 - DNA, 20 bp, Artificial Sequence
  Description of Artificial Sequence: Synthetic oligonucleotide
  Target: LAMA2; (+) strand; PAM type: YTN; PAM sequence: TTG
cattgcatattagcatgctg

SEQ ID NO: 406753 - DNA, 20 bp, Artificial Sequence
  Description of Artificial Sequence: Synthetic oligonucleotide
  Target: LAMA2; (+) strand; PAM type: YTN; PAM sequence: TTG
catattagcatgctgaaaga

SEQ ID NO: 406754 - DNA, 20 bp, Artificial Sequence
  Description of Artificial Sequence: Synthetic oligonucleotide
  Target: LAMA2; (+) strand; PAM type: YTN; PAM sequence: TTA
gcatgctgaaagatctgggc

SEQ ID NO: 406755 - DNA, 20 bp, Artificial Sequence
  Description of Artificial Sequence: Synthetic oligonucleotide
  Target: LAMA2; (+) strand; PAM type: YTN; PAM sequence: CTG
aaagatctgggcagctataa

SEQ ID NO: 406756 - DNA, 20 bp, Artificial Sequence
  Description of Artificial Sequence: Synthetic oligonucleotide
  Target: LAMA2; (+) strand; PAM type: YTN; PAM sequence: CTG
ggcagctataaaattaagaa

SEQ ID NO: 406757 - DNA, 20 bp, Artificial Sequence
  Description of Artificial Sequence: Synthetic oligonucleotide
  Target: LAMA2; (+) strand; PAM type: YTN; PAM sequence: CTA
taaaattaagaagatacatg

SEQ ID NO: 406758 - DNA, 20 bp, Artificial Sequence
  Description of Artificial Sequence: Synthetic oligonucleotide
  Target: LAMA2; (+) strand; PAM type: YTN; PAM sequence: TTA
agaagatacatgtttaactt

SEQ ID NO: 406759 - DNA, 20 bp, Artificial Sequence
  Description of Artificial Sequence: Synthetic oligonucleotide
  Target: LAMA2; (+) strand; PAM type: YTN; PAM sequence: TTT
aactttgtataacccagtat

SEQ ID NO: 406760 - DNA, 20 bp, Artificial Sequence
  Description of Artificial Sequence: Synthetic oligonucleotide
  Target: LAMA2; (+) strand; PAM type: YTN; PAM sequence: TTA
actttgtataacccagtatt

SEQ ID NO: 406761 - DNA, 20 bp, Artificial Sequence
  Description of Artificial Sequence: Synthetic oligonucleotide
  Target: LAMA2; (+) strand; PAM type: YTN; PAM sequence: CTT
tgtataacccagtatttgtc

SEQ ID NO: 406762 - DNA, 20 bp, Artificial Sequence
  Description of Artificial Sequence: Synthetic oligonucleotide
  Target: LAMA2; (+) strand; PAM type: YTN; PAM sequence: TTT
gtataacccagtatttgtca

SEQ ID NO: 406763 - DNA, 20 bp, Artificial Sequence
  Description of Artificial Sequence: Synthetic oligonucleotide
  Target: LAMA2; (+) strand; PAM type: YTN; PAM sequence: TTG
tataacccagtatttgtcat

SEQ ID NO: 406764 - DNA, 20 bp, Artificial Sequence
  Description of Artificial Sequence: Synthetic oligonucleotide
  Target: LAMA2; (+) strand; PAM type: YTN; PAM sequence: TTT
gtcatatttatttgagccag

SEQ ID NO: 406765 - DNA, 20 bp, Artificial Sequence
  Description of Artificial Sequence: Synthetic oligonucleotide
  Target: LAMA2; (+) strand; PAM type: YTN; PAM sequence: TTG
tcatatttatttgagccagg

SEQ ID NO: 406766 - DNA, 20 bp, Artificial Sequence
  Description of Artificial Sequence: Synthetic oligonucleotide
  Target: LAMA2; (+) strand; PAM type: YTN; PAM sequence: TTT
atttgagccaggaacatcca

SEQ ID NO: 406767 - DNA, 20 bp, Artificial Sequence
  Description of Artificial Sequence: Synthetic oligonucleotide
  Target: LAMA2; (+) strand; PAM type: YTN; PAM sequence: TTA
tttgagccaggaacatccaa

SEQ ID NO: 406768 - DNA, 20 bp, Artificial Sequence
  Description of Artificial Sequence: Synthetic oligonucleotide
  Target: LAMA2; (+) strand; PAM type: YTN; PAM sequence: TTT
gagccaggaacatccaagaa

SEQ ID NO: 406769 - DNA, 20 bp, Artificial Sequence
  Description of Artificial Sequence: Synthetic oligonucleotide
  Target: LAMA2; (+) strand; PAM type: YTN; PAM sequence: TTG
agccaggaacatccaagaaa

SEQ ID NO: 406770 - DNA, 20 bp, Artificial Sequence
  Description of Artificial Sequence: Synthetic oligonucleotide
  Target: LAMA2; (+) strand; PAM type: YTN; PAM sequence: CTA
gcatcctaaagaataaacat

SEQ ID NO: 406771 - DNA, 20 bp, Artificial Sequence
  Description of Artificial Sequence: Synthetic oligonucleotide
  Target: LAMA2; (+) strand; PAM type: YTN; PAM sequence: CTA
aagaataaacatttagaaat

SEQ ID NO: 406772 - DNA, 20 bp, Artificial Sequence
  Description of Artificial Sequence: Synthetic oligonucleotide
  Target: LAMA2; (+) strand; PAM type: YTN; PAM sequence: TTT
agaaattcccttataaccca

SEQ ID NO: 406773 - DNA, 20 bp, Artificial Sequence
  Description of Artificial Sequence: Synthetic oligonucleotide
  Target: LAMA2; (+) strand; PAM type: YTN; PAM sequence: TTA
gaaattcccttataacccac

SEQ ID NO: 406774 - DNA, 20 bp, Artificial Sequence
  Description of Artificial Sequence: Synthetic oligonucleotide
  Target: LAMA2; (+) strand; PAM type: YTN; PAM sequence: TTC
ccttataacccactggttca

SEQ ID NO: 406775 - DNA, 20 bp, Artificial Sequence
  Description of Artificial Sequence: Synthetic oligonucleotide
  Target: LAMA2; (+) strand; PAM type: YTN; PAM sequence: CTT
ataacccactggttcaaatg

SEQ ID NO: 406776 - DNA, 20 bp, Artificial Sequence
  Description of Artificial Sequence: Synthetic oligonucleotide
  Target: LAMA2; (+) strand; PAM type: YTN; PAM sequence: TTA
taacccactggttcaaatgc

SEQ ID NO: 406777 - DNA, 20 bp, Artificial Sequence
  Description of Artificial Sequence: Synthetic oligonucleotide
  Target: LAMA2; (+) strand; PAM type: YTN; PAM sequence: CTG
gttcaaatgcccattttcaa

SEQ ID NO: 406778 - DNA, 20 bp, Artificial Sequence
  Description of Artificial Sequence: Synthetic oligonucleotide
  Target: LAMA2; (+) strand; PAM type: YTN; PAM sequence: TTC
aaatgcccattttcaaaccc

SEQ ID NO: 406779 - DNA, 20 bp, Artificial Sequence
  Description of Artificial Sequence: Synthetic oligonucleotide
  Target: LAMA2; (+) strand; PAM type: YTN; PAM sequence: TTT
tcaaacccttgcttattcag

SEQ ID NO: 406780 - DNA, 20 bp, Artificial Sequence
  Description of Artificial Sequence: Synthetic oligonucleotide
  Target: LAMA2; (+) strand; PAM type: YTN; PAM sequence: TTT
caaacccttgcttattcaga

SEQ ID NO: 406781 - DNA, 20 bp, Artificial Sequence
  Description of Artificial Sequence: Synthetic oligonucleotide
  Target: LAMA2; (+) strand; PAM type: YTN; PAM sequence: TTC
aaacccttgcttattcagat

SEQ ID NO: 406782 - DNA, 20 bp, Artificial Sequence
  Description of Artificial Sequence: Synthetic oligonucleotide
  Target: LAMA2; (+) strand; PAM type: YTN; PAM sequence: CTT
gcttattcagatcctacatc

SEQ ID NO: 406783 - DNA, 20 bp, Artificial Sequence
  Description of Artificial Sequence: Synthetic oligonucleotide
  Target: LAMA2; (+) strand; PAM type: YTN; PAM sequence: TTG
cttattcagatcctacatca

SEQ ID NO: 406784 - DNA, 20 bp, Artificial Sequence
  Description of Artificial Sequence: Synthetic oligonucleotide
  Target: LAMA2; (+) strand; PAM type: YTN; PAM sequence: CTT
attcagatcctacatcagac

SEQ ID NO: 406785 - DNA, 20 bp, Artificial Sequence
  Description of Artificial Sequence: Synthetic oligonucleotide
  Target: LAMA2; (+) strand; PAM type: YTN; PAM sequence: TTA
ttcagatcctacatcagaca

SEQ ID NO: 406786 - DNA, 20 bp, Artificial Sequence
  Description of Artificial Sequence: Synthetic oligonucleotide
  Target: LAMA2; (+) strand; PAM type: YTN; PAM sequence: TTC
agatcctacatcagacaaag

SEQ ID NO: 406787 - DNA, 20 bp, Artificial Sequence
  Description of Artificial Sequence: Synthetic oligonucleotide
  Target: LAMA2; (+) strand; PAM type: YTN; PAM sequence: CTA
catcagacaaaggtttagag

SEQ ID NO: 406788 - DNA, 20 bp, Artificial Sequence
  Description of Artificial Sequence: Synthetic oligonucleotide
  Target: LAMA2; (+) strand; PAM type: YTN; PAM sequence: TTT
agaggccaaatctatcatct

SEQ ID NO: 406789 - DNA, 20 bp, Artificial Sequence
  Description of Artificial Sequence: Synthetic oligonucleotide
  Target: LAMA2; (+) strand; PAM type: YTN; PAM sequence: TTA
gaggccaaatctatcatctt

SEQ ID NO: 406790 - DNA, 20 bp, Artificial Sequence
  Description of Artificial Sequence: Synthetic oligonucleotide
  Target: LAMA2; (+) strand; PAM type: YTN; PAM sequence: CTA
tcatcttacgggactgatgt

SEQ ID NO: 406791 - DNA, 20 bp, Artificial Sequence
  Description of Artificial Sequence: Synthetic oligonucleotide
  Target: LAMA2; (+) strand; PAM type: YTN; PAM sequence: CTT
acgggactgatgtcaatacg

SEQ ID NO: 406792 - DNA, 20 bp, Artificial Sequence
  Description of Artificial Sequence: Synthetic oligonucleotide
  Target: LAMA2; (+) strand; PAM type: YTN; PAM sequence: TTA
cgggactgatgtcaatacgc

SEQ ID NO: 406793 - DNA, 20 bp, Artificial Sequence
  Description of Artificial Sequence: Synthetic oligonucleotide
  Target: LAMA2; (+) strand; PAM type: YTN; PAM sequence: CTG
atgtcaatacgcatcaagga

SEQ ID NO: 406794 - DNA, 20 bp, Artificial Sequence
  Description of Artificial Sequence: Synthetic oligonucleotide
  Target: LAMA2; (+) strand; PAM type: YTN; PAM sequence: TTA
aaggctagatctaaggacat

SEQ ID NO: 406795 - DNA, 20 bp, Artificial Sequence
  Description of Artificial Sequence: Synthetic oligonucleotide
  Target: LAMA2; (+) strand; PAM type: YTN; PAM sequence: CTA
gatctaaggacatgtggtag

SEQ ID NO: 406796 - DNA, 20 bp, Artificial Sequence
  Description of Artificial Sequence: Synthetic oligonucleotide
  Target: LAMA2; (+) strand; PAM type: YTN; PAM sequence: CTA
aggacatgtggtagaaaagc

SEQ ID NO: 406797 - DNA, 20 bp, Artificial Sequence
  Description of Artificial Sequence: Synthetic oligonucleotide
  Target: LAMA2; (+) strand; PAM type: YTN; PAM sequence: TTC
agaaaaagcctagcttgacc

SEQ ID NO: 406798 - DNA, 20 bp, Artificial Sequence
  Description of Artificial Sequence: Synthetic oligonucleotide
  Target: LAMA2; (+) strand; PAM type: YTN; PAM sequence: CTA
gcttgacccctaagaagggg

SEQ ID NO: 406799 - DNA, 20 bp, Artificial Sequence
  Description of Artificial Sequence: Synthetic oligonucleotide
  Target: LAMA2; (+) strand; PAM type: YTN; PAM sequence: CTT
gacccctaagaagggggcgg

SEQ ID NO: 406800 - DNA, 20 bp, Artificial Sequence
  Description of Artificial Sequence: Synthetic oligonucleotide
  Target: LAMA2; (+) strand; PAM type: YTN; PAM sequence: TTG
acccctaagaagggggcggt

SEQ ID NO: 406801 - DNA, 20 bp, Artificial Sequence
  Description of Artificial Sequence: Synthetic oligonucleotide
  Target: LAMA2; (+) strand; PAM type: YTN; PAM sequence: CTA
agaagggggcggtagtgaga

SEQ ID NO: 406802 - DNA, 20 bp, Artificial Sequence
  Description of Artificial Sequence: Synthetic oligonucleotide
  Target: LAMA2; (+) strand; PAM type: YTN; PAM sequence: TTC
ctgtctgctttctaaacaat

SEQ ID NO: 406803 - DNA, 20 bp, Artificial Sequence
  Description of Artificial Sequence: Synthetic oligonucleotide
  Target: LAMA2; (+) strand; PAM type: YTN; PAM sequence: CTG
tctgctttctaaacaatgca

SEQ ID NO: 406804 - DNA, 20 bp, Artificial Sequence
  Description of Artificial Sequence: Synthetic oligonucleotide
  Target: LAMA2; (+) strand; PAM type: YTN; PAM sequence: CTG
ctttctaaacaatgcagttt

SEQ ID NO: 406805 - DNA, 20 bp, Artificial Sequence
  Description of Artificial Sequence: Synthetic oligonucleotide
  Target: LAMA2; (+) strand; PAM type: YTN; PAM sequence: CTT
tctaaacaatgcagtttgaa

SEQ ID NO: 406806 - DNA, 20 bp, Artificial Sequence
  Description of Artificial Sequence: Synthetic oligonucleotide
  Target: LAMA2; (+) strand; PAM type: YTN; PAM sequence: TTT
ctaaacaatgcagtttgaac

SEQ ID NO: 406807 - DNA, 20 bp, Artificial Sequence
  Description of Artificial Sequence: Synthetic oligonucleotide
  Target: LAMA2; (+) strand; PAM type: YTN; PAM sequence: TTC
taaacaatgcagtttgaaca

SEQ ID NO: 406808 - DNA, 20 bp, Artificial Sequence
  Description of Artificial Sequence: Synthetic oligonucleotide
  Target: LAMA2; (+) strand; PAM type: YTN; PAM sequence: CTA
aacaatgcagtttgaacaga

SEQ ID NO: 406809 - DNA, 20 bp, Artificial Sequence
  Description of Artificial Sequence: Synthetic oligonucleotide
  Target: LAMA2; (+) strand; PAM type: YTN; PAM sequence: TTT
gaacagagaagtgcctcatc

SEQ ID NO: 406810 - DNA, 20 bp, Artificial Sequence
  Description of Artificial Sequence: Synthetic oligonucleotide
  Target: LAMA2; (+) strand; PAM type: YTN; PAM sequence: TTG
aacagagaagtgcctcatct

SEQ ID NO: 406811 - DNA, 20 bp, Artificial Sequence
  Description of Artificial Sequence: Synthetic oligonucleotide
  Target: LAMA2; (+) strand; PAM type: YTN; PAM sequence: CTC
atctttccttttttccatct

SEQ ID NO: 406812 - DNA, 20 bp, Artificial Sequence
  Description of Artificial Sequence: Synthetic oligonucleotide
  Target: LAMA2; (+) strand; PAM type: YTN; PAM sequence: CTT
tccttttttccatctatttc

SEQ ID NO: 406813 - DNA, 20 bp, Artificial Sequence
  Description of Artificial Sequence: Synthetic oligonucleotide
  Target: LAMA2; (+) strand; PAM type: YTN; PAM sequence: TTT
ccttttttccatctatttct

SEQ ID NO: 406814 - DNA, 20 bp, Artificial Sequence
  Description of Artificial Sequence: Synthetic oligonucleotide
  Target: LAMA2; (+) strand; PAM type: YTN; PAM sequence: TTC
cttttttccatctatttctg

SEQ ID NO: 406815 - DNA, 20 bp, Artificial Sequence
  Description of Artificial Sequence: Synthetic oligonucleotide
  Target: LAMA2; (+) strand; PAM type: YTN; PAM sequence: CTT
ttttccatctatttctgaat

SEQ ID NO: 406816 - DNA, 20 bp, Artificial Sequence
  Description of Artificial Sequence: Synthetic oligonucleotide
  Target: LAMA2; (+) strand; PAM type: YTN; PAM sequence: TTT
tttccatctatttctgaatt

SEQ ID NO: 406817 - DNA, 20 bp, Artificial Sequence
  Description of Artificial Sequence: Synthetic oligonucleotide
  Target: LAMA2; (+) strand; PAM type: YTN; PAM sequence: TTT
ttccatctatttctgaattc

SEQ ID NO: 406818 - DNA, 20 bp, Artificial Sequence
  Description of Artificial Sequence: Synthetic oligonucleotide
  Target: LAMA2; (+) strand; PAM type: YTN; PAM sequence: TTT
tccatctatttctgaattct

SEQ ID NO: 406819 - DNA, 20 bp, Artificial Sequence
  Description of Artificial Sequence: Synthetic oligonucleotide
  Target: LAMA2; (+) strand; PAM type: YTN; PAM sequence: TTT
ccatctatttctgaattctt

SEQ ID NO: 406820 - DNA, 20 bp, Artificial Sequence
  Description of Artificial Sequence: Synthetic oligonucleotide
  Target: LAMA2; (+) strand; PAM type: YTN; PAM sequence: TTC
catctatttctgaattctta

SEQ ID NO: 406821 - DNA, 20 bp, Artificial Sequence
  Description of Artificial Sequence: Synthetic oligonucleotide
  Target: LAMA2; (+) strand; PAM type: YTN; PAM sequence: CTA
tttctgaattcttatcttca

SEQ ID NO: 406822 - DNA, 20 bp, Artificial Sequence
  Description of Artificial Sequence: Synthetic oligonucleotide
  Target: LAMA2; (+) strand; PAM type: YTN; PAM sequence: TTT
ctgaattcttatcttcatca

SEQ ID NO: 406823 - DNA, 20 bp, Artificial Sequence
  Description of Artificial Sequence: Synthetic oligonucleotide
  Target: LAMA2; (+) strand; PAM type: YTN; PAM sequence: TTC
tgaattcttatcttcatcac

SEQ ID NO: 406824 - DNA, 20 bp, Artificial Sequence
  Description of Artificial Sequence: Synthetic oligonucleotide
  Target: LAMA2; (+) strand; PAM type: YTN; PAM sequence: CTG
aattcttatcttcatcacat

SEQ ID NO: 406825 - DNA, 20 bp, Artificial Sequence
  Description of Artificial Sequence: Synthetic oligonucleotide
  Target: LAMA2; (+) strand; PAM type: YTN; PAM sequence: TTC
ttatcttcatcacattaaaa

SEQ ID NO: 406826 - DNA, 20 bp, Artificial Sequence
  Description of Artificial Sequence: Synthetic oligonucleotide
  Target: LAMA2; (+) strand; PAM type: YTN; PAM sequence: CTT
atcttcatcacattaaaaat

SEQ ID NO: 406827 - DNA, 20 bp, Artificial Sequence
  Description of Artificial Sequence: Synthetic oligonucleotide
  Target: LAMA2; (+) strand; PAM type: YTN; PAM sequence: TTA
tcttcatcacattaaaaata

SEQ ID NO: 406828 - DNA, 20 bp, Artificial Sequence
  Description of Artificial Sequence: Synthetic oligonucleotide
  Target: LAMA2; (+) strand; PAM type: YTN; PAM sequence: CTT
catcacattaaaaatacctt

SEQ ID NO: 406829 - DNA, 20 bp, Artificial Sequence
  Description of Artificial Sequence: Synthetic oligonucleotide
  Target: LAMA2; (+) strand; PAM type: YTN; PAM sequence: TTC
atcacattaaaaataccttg

SEQ ID NO: 406830 - DNA, 20 bp, Artificial Sequence
  Description of Artificial Sequence: Synthetic oligonucleotide
  Target: LAMA2; (+) strand; PAM type: YTN; PAM sequence: TTA
aaaataccttgagagaccca

SEQ ID NO: 406831 - DNA, 20 bp, Artificial Sequence
  Description of Artificial Sequence: Synthetic oligonucleotide
  Target: LAMA2; (+) strand; PAM type: YTN; PAM sequence: CTT
gagagacccaaaagaaaagc

SEQ ID NO: 406832 - DNA, 20 bp, Artificial Sequence
  Description of Artificial Sequence: Synthetic oligonucleotide
  Target: LAMA2; (+) strand; PAM type: YTN; PAM sequence: TTG
agagacccaaaagaaaagca

SEQ ID NO: 406833 - DNA, 20 bp, Artificial Sequence
  Description of Artificial Sequence: Synthetic oligonucleotide
  Target: LAMA2; (+) strand; PAM type: YTN; PAM sequence: CTG
tacctctgtcacaacactta

SEQ ID NO: 406834 - DNA, 20 bp, Artificial Sequence
  Description of Artificial Sequence: Synthetic oligonucleotide
  Target: LAMA2; (+) strand; PAM type: YTN; PAM sequence: CTC
tgtcacaacacttagcatcc

SEQ ID NO: 406835 - DNA, 20 bp, Artificial Sequence
  Description of Artificial Sequence: Synthetic oligonucleotide
  Target: LAMA2; (+) strand; PAM type: YTN; PAM sequence: CTG
tcacaacacttagcatcctg

SEQ ID NO: 406836 - DNA, 20 bp, Artificial Sequence
  Description of Artificial Sequence: Synthetic oligonucleotide
  Target: LAMA2; (+) strand; PAM type: YTN; PAM sequence: CTT
agcatcctggtctaaaatgt

SEQ ID NO: 406837 - DNA, 20 bp, Artificial Sequence
  Description of Artificial Sequence: Synthetic oligonucleotide
  Target: LAMA2; (+) strand; PAM type: YTN; PAM sequence: TTA
gcatcctggtctaaaatgta

SEQ ID NO: 406838 - DNA, 20 bp, Artificial Sequence
  Description of Artificial Sequence: Synthetic oligonucleotide
  Target: LAMA2; (+) strand; PAM type: YTN; PAM sequence: CTG
gtctaaaatgtaatttacag

SEQ ID NO: 406839 - DNA, 20 bp, Artificial Sequence
  Description of Artificial Sequence: Synthetic oligonucleotide
  Target: LAMA2; (+) strand; PAM type: YTN; PAM sequence: CTA
aaatgtaatttacagtgtac

SEQ ID NO: 406840 - DNA, 20 bp, Artificial Sequence
  Description of Artificial Sequence: Synthetic oligonucleotide
  Target: LAMA2; (+) strand; PAM type: YTN; PAM sequence: TTT
acagtgtacctggatctcac

SEQ ID NO: 406841 - DNA, 20 bp, Artificial Sequence
  Description of Artificial Sequence: Synthetic oligonucleotide
  Target: LAMA2; (+) strand; PAM type: YTN; PAM sequence: TTA
cagtgtacctggatctcacc

SEQ ID NO: 406842 - DNA, 20 bp, Artificial Sequence
  Description of Artificial Sequence: Synthetic oligonucleotide
  Target: LAMA2; (+) strand; PAM type: YTN; PAM sequence: CTG
gatctcaccacttccttgta

SEQ ID NO: 406843 - DNA, 20 bp, Artificial Sequence
  Description of Artificial Sequence: Synthetic oligonucleotide
  Target: LAMA2; (+) strand; PAM type: YTN; PAM sequence: CTC
accacttccttgtacaacat

SEQ ID NO: 406844 - DNA, 20 bp, Artificial Sequence
  Description of Artificial Sequence: Synthetic oligonucleotide
  Target: LAMA2; (+) strand; PAM type: YTN; PAM sequence: CTT
ccttgtacaacatccccttc

SEQ ID NO: 406845 - DNA, 20 bp, Artificial Sequence
  Description of Artificial Sequence: Synthetic oligonucleotide
  Target: LAMA2; (+) strand; PAM type: YTN; PAM sequence: TTC
cttgtacaacatccccttcc

SEQ ID NO: 406846 - DNA, 20 bp, Artificial Sequence
  Description of Artificial Sequence: Synthetic oligonucleotide
  Target: LAMA2; (+) strand; PAM type: YTN; PAM sequence: CTT
gtacaacatccccttccact

SEQ ID NO: 406847 - DNA, 20 bp, Artificial Sequence
  Description of Artificial Sequence: Synthetic oligonucleotide
  Target: LAMA2; (+) strand; PAM type: YTN; PAM sequence: TTG
tacaacatccccttccactt

SEQ ID NO: 406848 - DNA, 20 bp, Artificial Sequence
  Description of Artificial Sequence: Synthetic oligonucleotide
  Target: LAMA2; (+) strand; PAM type: YTN; PAM sequence: CTT
ccacttccatgtacaatcat

SEQ ID NO: 406849 - DNA, 20 bp, Artificial Sequence
  Description of Artificial Sequence: Synthetic oligonucleotide
  Target: LAMA2; (+) strand; PAM type: YTN; PAM sequence: TTC
cacttccatgtacaatcata

SEQ ID NO: 406850 - DNA, 20 bp, Artificial Sequence
  Description of Artificial Sequence: Synthetic oligonucleotide
  Target: LAMA2; (+) strand; PAM type: YTN; PAM sequence: CTT
ccatgtacaatcatatttta

SEQ ID NO: 406851 - DNA, 20 bp, Artificial Sequence
  Description of Artificial Sequence: Synthetic oligonucleotide
  Target: LAMA2; (+) strand; PAM type: YTN; PAM sequence: TTC
catgtacaatcatattttac

SEQ ID NO: 406852 - DNA, 20 bp, Artificial Sequence
  Description of Artificial Sequence: Synthetic oligonucleotide
  Target: LAMA2; (+) strand; PAM type: YTN; PAM sequence: TTT
tacaacagtgacactttgca

SEQ ID NO: 406853 - DNA, 20 bp, Artificial Sequence
  Description of Artificial Sequence: Synthetic oligonucleotide
  Target: LAMA2; (+) strand; PAM type: YTN; PAM sequence: TTT
acaacagtgacactttgcag

SEQ ID NO: 406854 - DNA, 20 bp, Artificial Sequence
  Description of Artificial Sequence: Synthetic oligonucleotide
  Target: LAMA2; (+) strand; PAM type: YTN; PAM sequence: TTA
caacagtgacactttgcaga

SEQ ID NO: 406855 - DNA, 20 bp, Artificial Sequence
  Description of Artificial Sequence: Synthetic oligonucleotide
  Target: LAMA2; (+) strand; PAM type: YTN; PAM sequence: CTT
tgcagatgagtctaaatccc

SEQ ID NO: 406856 - DNA, 20 bp, Artificial Sequence
  Description of Artificial Sequence: Synthetic oligonucleotide
  Target: LAMA2; (+) strand; PAM type: YTN; PAM sequence: TTT
gcagatgagtctaaatccca

SEQ ID NO: 406857 - DNA, 20 bp, Artificial Sequence
  Description of Artificial Sequence: Synthetic oligonucleotide
  Target: LAMA2; (+) strand; PAM type: YTN; PAM sequence: TTG
cagatgagtctaaatcccag

SEQ ID NO: 406858 - DNA, 20 bp, Artificial Sequence
  Description of Artificial Sequence: Synthetic oligonucleotide
  Target: LAMA2; (+) strand; PAM type: YTN; PAM sequence: CTA
aatcccagtagttcctgtgg

SEQ ID NO: 406859 - DNA, 20 bp, Artificial Sequence
  Description of Artificial Sequence: Synthetic oligonucleotide
  Target: LAMA2; (+) strand; PAM type: YTN; PAM sequence: TTC
ctgtggatagtaaaacttac

SEQ ID NO: 406860 - DNA, 20 bp, Artificial Sequence
  Description of Artificial Sequence: Synthetic oligonucleotide
  Target: LAMA2; (+) strand; PAM type: YTN; PAM sequence: CTG
tggatagtaaaacttacaga

SEQ ID NO: 406861 - DNA, 20 bp, Artificial Sequence
  Description of Artificial Sequence: Synthetic oligonucleotide
  Target: LAMA2; (+) strand; PAM type: YTN; PAM sequence: CTT
acagaaagagccatagatta

SEQ ID NO: 406862 - DNA, 20 bp, Artificial Sequence
  Description of Artificial Sequence: Synthetic oligonucleotide
  Target: LAMA2; (+) strand; PAM type: YTN; PAM sequence: TTA
cagaaagagccatagattag

SEQ ID NO: 406863 - DNA, 20 bp, Artificial Sequence
  Description of Artificial Sequence: Synthetic oligonucleotide
  Target: LAMA2; (+) strand; PAM type: YTN; PAM sequence: TTA
ggcatatttctaattaatta

SEQ ID NO: 406864 - DNA, 20 bp, Artificial Sequence
  Description of Artificial Sequence: Synthetic oligonucleotide
  Target: LAMA2; (+) strand; PAM type: YTN; PAM sequence: TTT
ctaattaattatctgattcc

SEQ ID NO: 406865 - DNA, 20 bp, Artificial Sequence
  Description of Artificial Sequence: Synthetic oligonucleotide
  Target: LAMA2; (+) strand; PAM type: YTN; PAM sequence: TTC
taattaattatctgattcct

SEQ ID NO: 406866 - DNA, 20 bp, Artificial Sequence
  Description of Artificial Sequence: Synthetic oligonucleotide
  Target: LAMA2; (+) strand; PAM type: YTN; PAM sequence: CTA
attaattatctgattcctaa

SEQ ID NO: 406867 - DNA, 20 bp, Artificial Sequence
  Description of Artificial Sequence: Synthetic oligonucleotide
  Target: LAMA2; (+) strand; PAM type: YTN; PAM sequence: TTA
attatctgattcctaattag

SEQ ID NO: 406868 - DNA, 20 bp, Artificial Sequence
  Description of Artificial Sequence: Synthetic oligonucleotide
  Target: LAMA2; (+) strand; PAM type: YTN; PAM sequence: TTA
tctgattcctaattagatat

SEQ ID NO: 406869 - DNA, 20 bp, Artificial Sequence
  Description of Artificial Sequence: Synthetic oligonucleotide
  Target: LAMA2; (+) strand; PAM type: YTN; PAM sequence: CTG
attcctaattagatatcttt

SEQ ID NO: 406870 - DNA, 20 bp, Artificial Sequence
  Description of Artificial Sequence: Synthetic oligonucleotide
  Target: LAMA2; (+) strand; PAM type: YTN; PAM sequence: TTC
ctaattagatatctttgtta

SEQ ID NO: 406871 - DNA, 20 bp, Artificial Sequence
  Description of Artificial Sequence: Synthetic oligonucleotide
  Target: LAMA2; (+) strand; PAM type: YTN; PAM sequence: CTA
attagatatctttgttattt

SEQ ID NO: 406872 - DNA, 20 bp, Artificial Sequence
  Description of Artificial Sequence: Synthetic oligonucleotide
  Target: LAMA2; (+) strand; PAM type: YTN; PAM sequence: TTA
gatatctttgttatttagca

SEQ ID NO: 406873 - DNA, 20 bp, Artificial Sequence
  Description of Artificial Sequence: Synthetic oligonucleotide
  Target: LAMA2; (+) strand; PAM type: YTN; PAM sequence: CTT
tgttatttagcatttttaac

SEQ ID NO: 406874 - DNA, 20 bp, Artificial Sequence
  Description of Artificial Sequence: Synthetic oligonucleotide
  Target: LAMA2; (+) strand; PAM type: YTN; PAM sequence: TTT
gttatttagcatttttaacc

SEQ ID NO: 406875 - DNA, 20 bp, Artificial Sequence
  Description of Artificial Sequence: Synthetic oligonucleotide
  Target: LAMA2; (+) strand; PAM type: YTN; PAM sequence: TTG
ttatttagcatttttaacct

SEQ ID NO: 406876 - DNA, 20 bp, Artificial Sequence
  Description of Artificial Sequence: Synthetic oligonucleotide
  Target: LAMA2; (+) strand; PAM type: YTN; PAM sequence: TTA
tttagcatttttaaccttgc

SEQ ID NO: 406877 - DNA, 20 bp, Artificial Sequence
  Description of Artificial Sequence: Synthetic oligonucleotide
  Target: LAMA2; (+) strand; PAM type: YTN; PAM sequence: TTT
agcatttttaaccttgcttt

SEQ ID NO: 406878 - DNA, 20 bp, Artificial Sequence
  Description of Artificial Sequence: Synthetic oligonucleotide
  Target: LAMA2; (+) strand; PAM type: YTN; PAM sequence: TTA
gcatttttaaccttgcttta

SEQ ID NO: 406879 - DNA, 20 bp, Artificial Sequence
  Description of Artificial Sequence: Synthetic oligonucleotide
  Target: LAMA2; (+) strand; PAM type: YTN; PAM sequence: TTT
ttaaccttgctttattttct

SEQ ID NO: 406880 - DNA, 20 bp, Artificial Sequence
  Description of Artificial Sequence: Synthetic oligonucleotide
  Target: LAMA2; (+) strand; PAM type: YTN; PAM sequence: TTT
taaccttgctttattttcta

SEQ ID NO: 406881 - DNA, 20 bp, Artificial Sequence
  Description of Artificial Sequence: Synthetic oligonucleotide
  Target: LAMA2; (+) strand; PAM type: YTN; PAM sequence: TTT
aaccttgctttattttctaa

SEQ ID NO: 406882 - DNA, 20 bp, Artificial Sequence
  Description of Artificial Sequence: Synthetic oligonucleotide
  Target: LAMA2; (+) strand; PAM type: YTN; PAM sequence: TTA
accttgctttattttctaac

SEQ ID NO: 406883 - DNA, 20 bp, Artificial Sequence
  Description of Artificial Sequence: Synthetic oligonucleotide
  Target: LAMA2; (+) strand; PAM type: YTN; PAM sequence: CTT
gctttattttctaactactt

SEQ ID NO: 406884 - DNA, 20 bp, Artificial Sequence
  Description of Artificial Sequence: Synthetic oligonucleotide
  Target: LAMA2; (+) strand; PAM type: YTN; PAM sequence: TTG
ctttattttctaactactta

SEQ ID NO: 406885 - DNA, 20 bp, Artificial Sequence
  Description of Artificial Sequence: Synthetic oligonucleotide
  Target: LAMA2; (+) strand; PAM type: YTN; PAM sequence: CTT
tattttctaactacttatct

SEQ ID NO: 406886 - DNA, 20 bp, Artificial Sequence
  Description of Artificial Sequence: Synthetic oligonucleotide
  Target: LAMA2; (+) strand; PAM type: YTN; PAM sequence: TTT
attttctaactacttatcta

SEQ ID NO: 406887 - DNA, 20 bp, Artificial Sequence
  Description of Artificial Sequence: Synthetic oligonucleotide
  Target: LAMA2; (+) strand; PAM type: YTN; PAM sequence: TTA
ttttctaactacttatctag

SEQ ID NO: 406888 - DNA, 20 bp, Artificial Sequence
  Description of Artificial Sequence: Synthetic oligonucleotide
  Target: LAMA2; (+) strand; PAM type: YTN; PAM sequence: TTT
tctaactacttatctagatt

SEQ ID NO: 406889 - DNA, 20 bp, Artificial Sequence
  Description of Artificial Sequence: Synthetic oligonucleotide
  Target: LAMA2; (+) strand; PAM type: YTN; PAM sequence: TTT
ctaactacttatctagatta

SEQ ID NO: 406890 - DNA, 20 bp, Artificial Sequence
  Description of Artificial Sequence: Synthetic oligonucleotide
  Target: LAMA2; (+) strand; PAM type: YTN; PAM sequence: TTC
taactacttatctagattat

SEQ ID NO: 406891 - DNA, 20 bp, Artificial Sequence
  Description of Artificial Sequence: Synthetic oligonucleotide
  Target: LAMA2; (+) strand; PAM type: YTN; PAM sequence: CTA
actacttatctagattatag

SEQ ID NO: 406892 - DNA, 20 bp, Artificial Sequence
  Description of Artificial Sequence: Synthetic oligonucleotide
  Target: LAMA2; (+) strand; PAM type: YTN; PAM sequence: CTA
cttatctagattatagaaaa

SEQ ID NO: 406893 - DNA, 20 bp, Artificial Sequence
  Description of Artificial Sequence: Synthetic oligonucleotide
  Target: LAMA2; (+) strand; PAM type: YTN; PAM sequence: CTT
atctagattatagaaaacta

SEQ ID NO: 406894 - DNA, 20 bp, Artificial Sequence
  Description of Artificial Sequence: Synthetic oligonucleotide
  Target: LAMA2; (+) strand; PAM type: YTN; PAM sequence: TTA
tctagattatagaaaactac

SEQ ID NO: 406895 - DNA, 20 bp, Artificial Sequence
  Description of Artificial Sequence: Synthetic oligonucleotide
  Target: LAMA2; (+) strand; PAM type: YTN; PAM sequence: CTA
gattatagaaaactacatca

SEQ ID NO: 406896 - DNA, 20 bp, Artificial Sequence
  Description of Artificial Sequence: Synthetic oligonucleotide
  Target: LAMA2; (+) strand; PAM type: YTN; PAM sequence: TTA
tagaaaactacatcaaatgg

SEQ ID NO: 406897 - DNA, 20 bp, Artificial Sequence
  Description of Artificial Sequence: Synthetic oligonucleotide
  Target: LAMA2; (+) strand; PAM type: YTN; PAM sequence: CTA
catcaaatggatctttgatg

SEQ ID NO: 406898 - DNA, 20 bp, Artificial Sequence
  Description of Artificial Sequence: Synthetic oligonucleotide
  Target: LAMA2; (+) strand; PAM type: YTN; PAM sequence: CTT
tgatgttcagttatagttat

SEQ ID NO: 406899 - DNA, 20 bp, Artificial Sequence
  Description of Artificial Sequence: Synthetic oligonucleotide
  Target: LAMA2; (+) strand; PAM type: YTN; PAM sequence: TTT
gatgttcagttatagttatc

SEQ ID NO: 406900 - DNA, 20 bp, Artificial Sequence
  Description of Artificial Sequence: Synthetic oligonucleotide
  Target: LAMA2; (+) strand; PAM type: YTN; PAM sequence: TTG
atgttcagttatagttatct

SEQ ID NO: 406901 - DNA, 20 bp, Artificial Sequence
  Description of Artificial Sequence: Synthetic oligonucleotide
  Target: LAMA2; (+) strand; PAM type: YTN; PAM sequence: TTC
agttatagttatctctttta

SEQ ID NO: 406902 - DNA, 20 bp, Artificial Sequence
  Description of Artificial Sequence: Synthetic oligonucleotide
  Target: LAMA2; (+) strand; PAM type: YTN; PAM sequence: TTA
tagttatctcttttatcttc

SEQ ID NO: 406903 - DNA, 20 bp, Artificial Sequence
  Description of Artificial Sequence: Synthetic oligonucleotide
  Target: LAMA2; (+) strand; PAM type: YTN; PAM sequence: TTA
tctcttttatcttcattggt

SEQ ID NO: 406904 - DNA, 20 bp, Artificial Sequence
  Description of Artificial Sequence: Synthetic oligonucleotide
  Target: LAMA2; (+) strand; PAM type: YTN; PAM sequence: CTC
ttttatcttcattggtttgc

SEQ ID NO: 406905 - DNA, 20 bp, Artificial Sequence
  Description of Artificial Sequence: Synthetic oligonucleotide
  Target: LAMA2; (+) strand; PAM type: YTN; PAM sequence: CTT
ttatcttcattggtttgcct

SEQ ID NO: 406906 - DNA, 20 bp, Artificial Sequence
  Description of Artificial Sequence: Synthetic oligonucleotide
  Target: LAMA2; (+) strand; PAM type: YTN; PAM sequence: TTT
tatcttcattggtttgcctt

SEQ ID NO: 406907 - DNA, 20 bp, Artificial Sequence
  Description of Artificial Sequence: Synthetic oligonucleotide
  Target: LAMA2; (+) strand; PAM type: YTN; PAM sequence: TTT
atcttcattggtttgccttc

SEQ ID NO: 406908 - DNA, 20 bp, Artificial Sequence
  Description of Artificial Sequence: Synthetic oligonucleotide
  Target: LAMA2; (+) strand; PAM type: YTN; PAM sequence: TTA
tcttcattggtttgccttca

SEQ ID NO: 406909 - DNA, 20 bp, Artificial Sequence
  Description of Artificial Sequence: Synthetic oligonucleotide
  Target: LAMA2; (+) strand; PAM type: YTN; PAM sequence: CTT
cattggtttgccttcactgg

SEQ ID NO: 406910 - DNA, 20 bp, Artificial Sequence
  Description of Artificial Sequence: Synthetic oligonucleotide
  Target: LAMA2; (+) strand; PAM type: YTN; PAM sequence: TTC
attggtttgccttcactggt

SEQ ID NO: 406911 - DNA, 20 bp, Artificial Sequence
  Description of Artificial Sequence: Synthetic oligonucleotide
  Target: LAMA2; (+) strand; PAM type: YTN; PAM sequence: TTG
gtttgccttcactggtgttc

SEQ ID NO: 406912 - DNA, 20 bp, Artificial Sequence
  Description of Artificial Sequence: Synthetic oligonucleotide
  Target: LAMA2; (+) strand; PAM type: YTN; PAM sequence: TTT
gccttcactggtgttcaagc

SEQ ID NO: 406913 - DNA, 20 bp, Artificial Sequence
  Description of Artificial Sequence: Synthetic oligonucleotide
  Target: LAMA2; (+) strand; PAM type: YTN; PAM sequence: TTG
ccttcactggtgttcaagct

SEQ ID NO: 406914 - DNA, 20 bp, Artificial Sequence
  Description of Artificial Sequence: Synthetic oligonucleotide
  Target: LAMA2; (+) strand; PAM type: YTN; PAM sequence: CTT
cactggtgttcaagctatta

SEQ ID NO: 406915 - DNA, 20 bp, Artificial Sequence
  Description of Artificial Sequence: Synthetic oligonucleotide
  Target: LAMA2; (+) strand; PAM type: YTN; PAM sequence: TTC
actggtgttcaagctattat

SEQ ID NO: 406916 - DNA, 20 bp, Artificial Sequence
  Description of Artificial Sequence: Synthetic oligonucleotide
  Target: LAMA2; (+) strand; PAM type: YTN; PAM sequence: CTG
gtgttcaagctattattttc

SEQ ID NO: 406917 - DNA, 20 bp, Artificial Sequence
  Description of Artificial Sequence: Synthetic oligonucleotide
  Target: LAMA2; (+) strand; PAM type: YTN; PAM sequence: TTC
aagctattattttcatgctc

SEQ ID NO: 406918 - DNA, 20 bp, Artificial Sequence
  Description of Artificial Sequence: Synthetic oligonucleotide
  Target: LAMA2; (+) strand; PAM type: YTN; PAM sequence: CTA
ttattttcatgctctttggg

SEQ ID NO: 406919 - DNA, 20 bp, Artificial Sequence
  Description of Artificial Sequence: Synthetic oligonucleotide
  Target: LAMA2; (+) strand; PAM type: YTN; PAM sequence: TTA
ttttcatgctctttggggga

SEQ ID NO: 406920 - DNA, 20 bp, Artificial Sequence
  Description of Artificial Sequence: Synthetic oligonucleotide
  Target: LAMA2; (+) strand; PAM type: YTN; PAM sequence: TTT
tcatgctctttgggggatag

SEQ ID NO: 406921 - DNA, 20 bp, Artificial Sequence
  Description of Artificial Sequence: Synthetic oligonucleotide
  Target: LAMA2; (+) strand; PAM type: YTN; PAM sequence: TTT
catgctctttgggggatagt

SEQ ID NO: 406922 - DNA, 20 bp, Artificial Sequence
  Description of Artificial Sequence: Synthetic oligonucleotide
  Target: LAMA2; (+) strand; PAM type: YTN; PAM sequence: TTC
atgctctttgggggatagtt

SEQ ID NO: 406923 - DNA, 20 bp, Artificial Sequence
  Description of Artificial Sequence: Synthetic oligonucleotide
  Target: LAMA2; (+) strand; PAM type: YTN; PAM sequence: CTC
tttgggggatagtttaataa

SEQ ID NO: 406924 - DNA, 20 bp, Artificial Sequence
  Description of Artificial Sequence: Synthetic oligonucleotide
  Target: LAMA2; (+) strand; PAM type: YTN; PAM sequence: CTT
tgggggatagtttaataatg

SEQ ID NO: 406925 - DNA, 20 bp, Artificial Sequence
  Description of Artificial Sequence: Synthetic oligonucleotide
  Target: LAMA2; (+) strand; PAM type: YTN; PAM sequence: TTT
gggggatagtttaataatgt

SEQ ID NO: 406926 - DNA, 20 bp, Artificial Sequence
  Description of Artificial Sequence: Synthetic oligonucleotide
  Target: LAMA2; (+) strand; PAM type: YTN; PAM sequence: TTG
ggggatagtttaataatgta

SEQ ID NO: 406927 - DNA, 20 bp, Artificial Sequence
  Description of Artificial Sequence: Synthetic oligonucleotide
  Target: LAMA2; (+) strand; PAM type: YTN; PAM sequence: TTT
aataatgtattttattgatg

SEQ ID NO: 406928 - DNA, 20 bp, Artificial Sequence
  Description of Artificial Sequence: Synthetic oligonucleotide
  Target: LAMA2; (+) strand; PAM type: YTN; PAM sequence: TTA
ataatgtattttattgatgt

SEQ ID NO: 406929 - DNA, 20 bp, Artificial Sequence
  Description of Artificial Sequence: Synthetic oligonucleotide
  Target: LAMA2; (+) strand; PAM type: YTN; PAM sequence: TTT
tattgatgttatttctgtaa

SEQ ID NO: 406930 - DNA, 20 bp, Artificial Sequence
  Description of Artificial Sequence: Synthetic oligonucleotide
  Target: LAMA2; (+) strand; PAM type: YTN; PAM sequence: TTT
attgatgttatttctgtaat

SEQ ID NO: 406931 - DNA, 20 bp, Artificial Sequence
  Description of Artificial Sequence: Synthetic oligonucleotide
  Target: LAMA2; (+) strand; PAM type: YTN; PAM sequence: TTA
ttgatgttatttctgtaatt

SEQ ID NO: 406932 - DNA, 20 bp, Artificial Sequence
  Description of Artificial Sequence: Synthetic oligonucleotide
  Target: LAMA2; (+) strand; PAM type: YTN; PAM sequence: TTG
atgttatttctgtaattatt

SEQ ID NO: 406933 - DNA, 20 bp, Artificial Sequence
  Description of Artificial Sequence: Synthetic oligonucleotide
  Target: LAMA2; (+) strand; PAM type: YTN; PAM sequence: TTA
tttctgtaattattaaattg

SEQ ID NO: 406934 - DNA, 20 bp, Artificial Sequence
  Description of Artificial Sequence: Synthetic oligonucleotide
  Target: LAMA2; (+) strand; PAM type: YTN; PAM sequence: TTT
ctgtaattattaaattgcta

SEQ ID NO: 406935 - DNA, 20 bp, Artificial Sequence
  Description of Artificial Sequence: Synthetic oligonucleotide
  Target: LAMA2; (+) strand; PAM type: YTN; PAM sequence: TTC
tgtaattattaaattgctaa

SEQ ID NO: 406936 - DNA, 20 bp, Artificial Sequence
  Description of Artificial Sequence: Synthetic oligonucleotide
  Target: LAMA2; (+) strand; PAM type: YTN; PAM sequence: CTG
taattattaaattgctaaat

SEQ ID NO: 406937 - DNA, 20 bp, Artificial Sequence
  Description of Artificial Sequence: Synthetic oligonucleotide
  Target: LAMA2; (+) strand; PAM type: YTN; PAM sequence: TTA
ttaaattgctaaatatagtg

SEQ ID NO: 406938 - DNA, 20 bp, Artificial Sequence
  Description of Artificial Sequence: Synthetic oligonucleotide
  Target: LAMA2; (+) strand; PAM type: YTN; PAM sequence: TTA
aattgctaaatatagtgcaa

SEQ ID NO: 406939 - DNA, 20 bp, Artificial Sequence
  Description of Artificial Sequence: Synthetic oligonucleotide
  Target: LAMA2; (+) strand; PAM type: YTN; PAM sequence: TTG
ctaaatatagtgcaagtgct

SEQ ID NO: 406940 - DNA, 20 bp, Artificial Sequence
  Description of Artificial Sequence: Synthetic oligonucleotide
  Target: LAMA2; (+) strand; PAM type: YTN; PAM sequence: CTA
aatatagtgcaagtgcttga

SEQ ID NO: 406941 - DNA, 20 bp, Artificial Sequence
  Description of Artificial Sequence: Synthetic oligonucleotide
  Target: LAMA2; (+) strand; PAM type: YTN; PAM sequence: CTT
gagaaagtcaatgttaattc

SEQ ID NO: 406942 - DNA, 20 bp, Artificial Sequence
  Description of Artificial Sequence: Synthetic oligonucleotide
  Target: LAMA2; (+) strand; PAM type: YTN; PAM sequence: TTG
agaaagtcaatgttaattct

SEQ ID NO: 406943 - DNA, 20 bp, Artificial Sequence
  Description of Artificial Sequence: Synthetic oligonucleotide
  Target: LAMA2; (+) strand; PAM type: YTN; PAM sequence: TTA
attctcgaattaaaccaaat

SEQ ID NO: 406944 - DNA, 20 bp, Artificial Sequence
  Description of Artificial Sequence: Synthetic oligonucleotide
  Target: LAMA2; (+) strand; PAM type: YTN; PAM sequence: TTC
tcgaattaaaccaaatttgt

SEQ ID NO: 406945 - DNA, 20 bp, Artificial Sequence
  Description of Artificial Sequence: Synthetic oligonucleotide
  Target: LAMA2; (+) strand; PAM type: YTN; PAM sequence: CTC
gaattaaaccaaatttgtct

SEQ ID NO: 406946 - DNA, 20 bp, Artificial Sequence
  Description of Artificial Sequence: Synthetic oligonucleotide
  Target: LAMA2; (+) strand; PAM type: YTN; PAM sequence: TTA
aaccaaatttgtcttgaagt

SEQ ID NO: 406947 - DNA, 20 bp, Artificial Sequence
  Description of Artificial Sequence: Synthetic oligonucleotide
  Target: LAMA2; (+) strand; PAM type: YTN; PAM sequence: TTT
gtcttgaagtattaatgatg

SEQ ID NO: 406948 - DNA, 20 bp, Artificial Sequence
  Description of Artificial Sequence: Synthetic oligonucleotide
  Target: LAMA2; (+) strand; PAM type: YTN; PAM sequence: TTG
tcttgaagtattaatgatga

SEQ ID NO: 406949 - DNA, 20 bp, Artificial Sequence
  Description of Artificial Sequence: Synthetic oligonucleotide
  Target: LAMA2; (+) strand; PAM type: YTN; PAM sequence: CTT
gaagtattaatgatgatata

SEQ ID NO: 406950 - DNA, 20 bp, Artificial Sequence
  Description of Artificial Sequence: Synthetic oligonucleotide
  Target: LAMA2; (+) strand; PAM type: YTN; PAM sequence: TTG
aagtattaatgatgatatag

SEQ ID NO: 406951 - DNA, 20 bp, Artificial Sequence
  Description of Artificial Sequence: Synthetic oligonucleotide
  Target: LAMA2; (+) strand; PAM type: YTN; PAM sequence: TTA
atgatgatatagatgtggtt

SEQ ID NO: 406952 - DNA, 20 bp, Artificial Sequence
  Description of Artificial Sequence: Synthetic oligonucleotide
  Target: LAMA2; (+) strand; PAM type: YTN; PAM sequence: TTG
atattgctcaaataaaatgt

SEQ ID NO: 406953 - DNA, 20 bp, Artificial Sequence
  Description of Artificial Sequence: Synthetic oligonucleotide
  Target: LAMA2; (+) strand; PAM type: YTN; PAM sequence: TTG
ctcaaataaaatgttaaact

SEQ ID NO: 406954 - DNA, 20 bp, Artificial Sequence
  Description of Artificial Sequence: Synthetic oligonucleotide
  Target: LAMA2; (+) strand; PAM type: YTN; PAM sequence: CTC
aaataaaatgttaaactttc

SEQ ID NO: 406955 - DNA, 20 bp, Artificial Sequence
  Description of Artificial Sequence: Synthetic oligonucleotide
  Target: LAMA2; (+) strand; PAM type: YTN; PAM sequence: TTA
aactttctttctcctttaca

SEQ ID NO: 406956 - DNA, 20 bp, Artificial Sequence
  Description of Artificial Sequence: Synthetic oligonucleotide
  Target: LAMA2; (+) strand; PAM type: YTN; PAM sequence: CTT
tctttctcctttacagccaa

SEQ ID NO: 406957 - DNA, 20 bp, Artificial Sequence
  Description of Artificial Sequence: Synthetic oligonucleotide
  Target: LAMA2; (+) strand; PAM type: YTN; PAM sequence: TTT
ctttctcctttacagccaat

SEQ ID NO: 406958 - DNA, 20 bp, Artificial Sequence
  Description of Artificial Sequence: Synthetic oligonucleotide
  Target: LAMA2; (+) strand; PAM type: YTN; PAM sequence: TTC
tttctcctttacagccaata

SEQ ID NO: 406959 - DNA, 20 bp, Artificial Sequence
  Description of Artificial Sequence: Synthetic oligonucleotide
  Target: LAMA2; (+) strand; PAM type: YTN; PAM sequence: CTT
tctcctttacagccaatata

SEQ ID NO: 406960 - DNA, 20 bp, Artificial Sequence
  Description of Artificial Sequence: Synthetic oligonucleotide
  Target: LAMA2; (+) strand; PAM type: YTN; PAM sequence: TTT
ctcctttacagccaatatat

SEQ ID NO: 406961 - DNA, 20 bp, Artificial Sequence
  Description of Artificial Sequence: Synthetic oligonucleotide
  Target: LAMA2; (+) strand; PAM type: YTN; PAM sequence: TTC
tcctttacagccaatatatc

SEQ ID NO: 406962 - DNA, 20 bp, Artificial Sequence
  Description of Artificial Sequence: Synthetic oligonucleotide
  Target: LAMA2; (+) strand; PAM type: YTN; PAM sequence: CTC
ctttacagccaatatatcaa

SEQ ID NO: 406963 - DNA, 20 bp, Artificial Sequence
  Description of Artificial Sequence: Synthetic oligonucleotide
  Target: LAMA2; (+) strand; PAM type: YTN; PAM sequence: CTT
tacagccaatatatcaattg

SEQ ID NO: 406964 - DNA, 20 bp, Artificial Sequence
  Description of Artificial Sequence: Synthetic oligonucleotide
  Target: LAMA2; (+) strand; PAM type: YTN; PAM sequence: TTT
acagccaatatatcaattgt

SEQ ID NO: 406965 - DNA, 20 bp, Artificial Sequence
  Description of Artificial Sequence: Synthetic oligonucleotide
  Target: LAMA2; (+) strand; PAM type: YTN; PAM sequence: TTA
cagccaatatatcaattgta

SEQ ID NO: 406966 - DNA, 20 bp, Artificial Sequence
  Description of Artificial Sequence: Synthetic oligonucleotide
  Target: LAMA2; (+) strand; PAM type: YTN; PAM sequence: TTG
tagatatagatactaatcag

SEQ ID NO: 406967 - DNA, 20 bp, Artificial Sequence
  Description of Artificial Sequence: Synthetic oligonucleotide
  Target: LAMA2; (+) strand; PAM type: YTN; PAM sequence: CTA
atcaggaggagaatatagca

SEQ ID NO: 406968 - DNA, 20 bp, Artificial Sequence
  Description of Artificial Sequence: Synthetic oligonucleotide
  Target: LAMA2; (+) strand; PAM type: YTN; PAM sequence: CTT
cgtcttctggaaacaacttt

SEQ ID NO: 406969 - DNA, 20 bp, Artificial Sequence
  Description of Artificial Sequence: Synthetic oligonucleotide
  Target: LAMA2; (+) strand; PAM type: YTN; PAM sequence: TTC
gtcttctggaaacaactttg

SEQ ID NO: 406970 - DNA, 20 bp, Artificial Sequence
  Description of Artificial Sequence: Synthetic oligonucleotide
  Target: LAMA2; (+) strand; PAM type: YTN; PAM sequence: CTT
ctggaaacaactttggtctt

SEQ ID NO: 406971 - DNA, 20 bp, Artificial Sequence
  Description of Artificial Sequence: Synthetic oligonucleotide
  Target: LAMA2; (+) strand; PAM type: YTN; PAM sequence: TTC
tggaaacaactttggtcttg

SEQ ID NO: 406972 - DNA, 20 bp, Artificial Sequence
  Description of Artificial Sequence: Synthetic oligonucleotide
  Target: LAMA2; (+) strand; PAM type: YTN; PAM sequence: CTG
gaaacaactttggtcttgac

SEQ ID NO: 406973 - DNA, 20 bp, Artificial Sequence
  Description of Artificial Sequence: Synthetic oligonucleotide
  Target: LAMA2; (+) strand; PAM type: YTN; PAM sequence: CTT
tggtcttgacttgaaagcag

SEQ ID NO: 406974 - DNA, 20 bp, Artificial Sequence
  Description of Artificial Sequence: Synthetic oligonucleotide
  Target: LAMA2; (+) strand; PAM type: YTN; PAM sequence: TTT
ggtcttgacttgaaagcaga

SEQ ID NO: 406975 - DNA, 20 bp, Artificial Sequence
  Description of Artificial Sequence: Synthetic oligonucleotide
  Target: LAMA2; (+) strand; PAM type: YTN; PAM sequence: TTG
gtcttgacttgaaagcagat

SEQ ID NO: 406976 - DNA, 20 bp, Artificial Sequence
  Description of Artificial Sequence: Synthetic oligonucleotide
  Target: LAMA2; (+) strand; PAM type: YTN; PAM sequence: CTT
gacttgaaagcagatgacaa

SEQ ID NO: 406977 - DNA, 20 bp, Artificial Sequence
  Description of Artificial Sequence: Synthetic oligonucleotide
  Target: LAMA2; (+) strand; PAM type: YTN; PAM sequence: TTG
acttgaaagcagatgacaaa

SEQ ID NO: 406978 - DNA, 20 bp, Artificial Sequence
  Description of Artificial Sequence: Synthetic oligonucleotide
  Target: LAMA2; (+) strand; PAM type: YTN; PAM sequence: CTT
gaaagcagatgacaaaatat

SEQ ID NO: 406979 - DNA, 20 bp, Artificial Sequence
  Description of Artificial Sequence: Synthetic oligonucleotide
  Target: LAMA2; (+) strand; PAM type: YTN; PAM sequence: TTG
aaagcagatgacaaaatata

SEQ ID NO: 406980 - DNA, 20 bp, Artificial Sequence
  Description of Artificial Sequence: Synthetic oligonucleotide
  Target: LAMA2; (+) strand; PAM type: YTN; PAM sequence: TTT
tggtggcctgccaacgctga

SEQ ID NO: 406981 - DNA, 20 bp, Artificial Sequence
  Description of Artificial Sequence: Synthetic oligonucleotide
  Target: LAMA2; (+) strand; PAM type: YTN; PAM sequence: TTT
ggtggcctgccaacgctgag

SEQ ID NO: 406982 - DNA, 20 bp, Artificial Sequence
  Description of Artificial Sequence: Synthetic oligonucleotide
  Target: LAMA2; (+) strand; PAM type: YTN; PAM sequence: TTG
gtggcctgccaacgctgaga

SEQ ID NO: 406983 - DNA, 20 bp, Artificial Sequence
  Description of Artificial Sequence: Synthetic oligonucleotide
  Target: LAMA2; (+) strand; PAM type: YTN; PAM sequence: CTG
ccaacgctgagaaacttgag

SEQ ID NO: 406984 - DNA, 20 bp, Artificial Sequence
  Description of Artificial Sequence: Synthetic oligonucleotide
  Target: LAMA2; (+) strand; PAM type: YTN; PAM sequence: CTG
agaaacttgaggtaatttag

SEQ ID NO: 406985 - DNA, 20 bp, Artificial Sequence
  Description of Artificial Sequence: Synthetic oligonucleotide
  Target: LAMA2; (+) strand; PAM type: YTN; PAM sequence: CTT
gaggtaatttagtttatatg

SEQ ID NO: 406986 - DNA, 20 bp, Artificial Sequence
  Description of Artificial Sequence: Synthetic oligonucleotide
  Target: LAMA2; (+) strand; PAM type: YTN; PAM sequence: TTG
aggtaatttagtttatatgt

SEQ ID NO: 406987 - DNA, 20 bp, Artificial Sequence
  Description of Artificial Sequence: Synthetic oligonucleotide
  Target: LAMA2; (+) strand; PAM type: YTN; PAM sequence: TTT
agtttatatgtaaagctaag

SEQ ID NO: 406988 - DNA, 20 bp, Artificial Sequence
  Description of Artificial Sequence: Synthetic oligonucleotide
  Target: LAMA2; (+) strand; PAM type: YTN; PAM sequence: TTA
gtttatatgtaaagctaagg

SEQ ID NO: 406989 - DNA, 20 bp, Artificial Sequence
  Description of Artificial Sequence: Synthetic oligonucleotide
  Target: LAMA2; (+) strand; PAM type: YTN; PAM sequence: TTT
atatgtaaagctaaggatta

SEQ ID NO: 406990 - DNA, 20 bp, Artificial Sequence
  Description of Artificial Sequence: Synthetic oligonucleotide
  Target: LAMA2; (+) strand; PAM type: YTN; PAM sequence: TTA
tatgtaaagctaaggattaa

SEQ ID NO: 406991 - DNA, 20 bp, Artificial Sequence
  Description of Artificial Sequence: Synthetic oligonucleotide
  Target: LAMA2; (+) strand; PAM type: YTN; PAM sequence: CTA
aggattaagttttaattaaa

SEQ ID NO: 406992 - DNA, 20 bp, Artificial Sequence
  Description of Artificial Sequence: Synthetic oligonucleotide
  Target: LAMA2; (+) strand; PAM type: YTN; PAM sequence: TTA
agttttaattaaatgaccac

SEQ ID NO: 406993 - DNA, 20 bp, Artificial Sequence
  Description of Artificial Sequence: Synthetic oligonucleotide
  Target: LAMA2; (+) strand; PAM type: YTN; PAM sequence: TTT
taattaaatgaccactatgc

SEQ ID NO: 406994 - DNA, 20 bp, Artificial Sequence
  Description of Artificial Sequence: Synthetic oligonucleotide
  Target: LAMA2; (+) strand; PAM type: YTN; PAM sequence: TTT
aattaaatgaccactatgct

SEQ ID NO: 406995 - DNA, 20 bp, Artificial Sequence
  Description of Artificial Sequence: Synthetic oligonucleotide
  Target: LAMA2; (+) strand; PAM type: YTN; PAM sequence: TTA
attaaatgaccactatgctc

SEQ ID NO: 406996 - DNA, 20 bp, Artificial Sequence
  Description of Artificial Sequence: Synthetic oligonucleotide
  Target: LAMA2; (+) strand; PAM type: YTN; PAM sequence: TTA
aatgaccactatgctcacta

SEQ ID NO: 406997 - DNA, 20 bp, Artificial Sequence
  Description of Artificial Sequence: Synthetic oligonucleotide
  Target: LAMA2; (+) strand; PAM type: YTN; PAM sequence: CTA
tgctcactagagttctgaag

SEQ ID NO: 406998 - DNA, 20 bp, Artificial Sequence
  Description of Artificial Sequence: Synthetic oligonucleotide
  Target: LAMA2; (+) strand; PAM type: YTN; PAM sequence: CTC
actagagttctgaagtttaa

SEQ ID NO: 406999 - DNA, 20 bp, Artificial Sequence
  Description of Artificial Sequence: Synthetic oligonucleotide
  Target: LAMA2; (+) strand; PAM type: YTN; PAM sequence: CTA
gagttctgaagtttaattac

SEQ ID NO: 407000 - DNA, 20 bp, Artificial Sequence
  Description of Artificial Sequence: Synthetic oligonucleotide
  Target: LAMA2; (+) strand; PAM type: YTN; PAM sequence: TTC
tgaagtttaattacaataag

SEQ ID NO: 407001 - DNA, 20 bp, Artificial Sequence
  Description of Artificial Sequence: Synthetic oligonucleotide
  Target: LAMA2; (+) strand; PAM type: YTN; PAM sequence: CTG
aagtttaattacaataagaa

SEQ ID NO: 407002 - DNA, 20 bp, Artificial Sequence
  Description of Artificial Sequence: Synthetic oligonucleotide
  Target: LAMA2; (+) strand; PAM type: YTN; PAM sequence: TTT
aattacaataagaatgtcat

SEQ ID NO: 407003 - DNA, 20 bp, Artificial Sequence
  Description of Artificial Sequence: Synthetic oligonucleotide
  Target: LAMA2; (+) strand; PAM type: YTN; PAM sequence: TTA
attacaataagaatgtcata

SEQ ID NO: 407004 - DNA, 20 bp, Artificial Sequence
  Description of Artificial Sequence: Synthetic oligonucleotide
  Target: LAMA2; (+) strand; PAM type: YTN; PAM sequence: TTA
caataagaatgtcatataac

SEQ ID NO: 407005 - DNA, 20 bp, Artificial Sequence
  Description of Artificial Sequence: Synthetic oligonucleotide
  Target: LAMA2; (+) strand; PAM type: YTN; PAM sequence: CTT
ggttgcagaaaggcctaatc

SEQ ID NO: 407006 - DNA, 20 bp, Artificial Sequence
  Description of Artificial Sequence: Synthetic oligonucleotide
  Target: LAMA2; (+) strand; PAM type: YTN; PAM sequence: TTG
gttgcagaaaggcctaatca

SEQ ID NO: 407007 - DNA, 20 bp, Artificial Sequence
  Description of Artificial Sequence: Synthetic oligonucleotide
  Target: LAMA2; (+) strand; PAM type: YTN; PAM sequence: TTG
cagaaaggcctaatcaaaaa

SEQ ID NO: 407008 - DNA, 20 bp, Artificial Sequence
  Description of Artificial Sequence: Synthetic oligonucleotide
  Target: LAMA2; (+) strand; PAM type: YTN; PAM sequence: CTA
atcaaaaacatcatgttgca

SEQ ID NO: 407009 - DNA, 20 bp, Artificial Sequence
  Description of Artificial Sequence: Synthetic oligonucleotide
  Target: LAMA2; (+) strand; PAM type: YTN; PAM sequence: TTG
catgttagaacaacaccagg

SEQ ID NO: 407010 - DNA, 20 bp, Artificial Sequence
  Description of Artificial Sequence: Synthetic oligonucleotide
  Target: LAMA2; (+) strand; PAM type: YTN; PAM sequence: TTA
gaacaacaccaggatttaga

SEQ ID NO: 407011 - DNA, 20 bp, Artificial Sequence
  Description of Artificial Sequence: Synthetic oligonucleotide
  Target: LAMA2; (+) strand; PAM type: YTN; PAM sequence: TTT
agaaaccaaaggactaattt

SEQ ID NO: 407012 - DNA, 20 bp, Artificial Sequence
  Description of Artificial Sequence: Synthetic oligonucleotide
  Target: LAMA2; (+) strand; PAM type: YTN; PAM sequence: TTA
gaaaccaaaggactaatttg

SEQ ID NO: 407013 - DNA, 20 bp, Artificial Sequence
  Description of Artificial Sequence: Synthetic oligonucleotide
  Target: LAMA2; (+) strand; PAM type: YTN; PAM sequence: CTA
atttgacatctttgttgaag

SEQ ID NO: 407014 - DNA, 20 bp, Artificial Sequence
  Description of Artificial Sequence: Synthetic oligonucleotide
  Target: LAMA2; (+) strand; PAM type: YTN; PAM sequence: TTT
gacatctttgttgaagagat

SEQ ID NO: 407015 - DNA, 20 bp, Artificial Sequence
  Description of Artificial Sequence: Synthetic oligonucleotide
  Target: LAMA2; (+) strand; PAM type: YTN; PAM sequence: TTG
acatctttgttgaagagatg

SEQ ID NO: 407016 - DNA, 20 bp, Artificial Sequence
  Description of Artificial Sequence: Synthetic oligonucleotide
  Target: LAMA2; (+) strand; PAM type: YTN; PAM sequence: CTT
tgttgaagagatggattgga

SEQ ID NO: 407017 - DNA, 20 bp, Artificial Sequence
  Description of Artificial Sequence: Synthetic oligonucleotide
  Target: LAMA2; (+) strand; PAM type: YTN; PAM sequence: TTT
gttgaagagatggattggag

SEQ ID NO: 407018 - DNA, 20 bp, Artificial Sequence
  Description of Artificial Sequence: Synthetic oligonucleotide
  Target: LAMA2; (+) strand; PAM type: YTN; PAM sequence: TTG
ttgaagagatggattggagt

SEQ ID NO: 407019 - DNA, 20 bp, Artificial Sequence
  Description of Artificial Sequence: Synthetic oligonucleotide
  Target: LAMA2; (+) strand; PAM type: YTN; PAM sequence: TTG
aagagatggattggagtcgc

SEQ ID NO: 407020 - DNA, 20 bp, Artificial Sequence
  Description of Artificial Sequence: Synthetic oligonucleotide
  Target: LAMA2; (+) strand; PAM type: YTN; PAM sequence: TTG
gagtcgctgtttcctttata

SEQ ID NO: 407021 - DNA, 20 bp, Artificial Sequence
  Description of Artificial Sequence: Synthetic oligonucleotide
  Target: LAMA2; (+) strand; PAM type: YTN; PAM sequence: CTG
tttcctttatatgcacctgc

SEQ ID NO: 407022 - DNA, 20 bp, Artificial Sequence
  Description of Artificial Sequence: Synthetic oligonucleotide
  Target: LAMA2; (+) strand; PAM type: YTN; PAM sequence: TTT
cctttatatgcacctgctga

SEQ ID NO: 407023 - DNA, 20 bp, Artificial Sequence
  Description of Artificial Sequence: Synthetic oligonucleotide
  Target: LAMA2; (+) strand; PAM type: YTN; PAM sequence: TTC
ctttatatgcacctgctgaa

SEQ ID NO: 407024 - DNA, 20 bp, Artificial Sequence
  Description of Artificial Sequence: Synthetic oligonucleotide
  Target: LAMA2; (+) strand; PAM type: YTN; PAM sequence: CTT
tatatgcacctgctgaaaag

SEQ ID NO: 407025 - DNA, 20 bp, Artificial Sequence
  Description of Artificial Sequence: Synthetic oligonucleotide
  Target: LAMA2; (+) strand; PAM type: YTN; PAM sequence: TTT
atatgcacctgctgaaaaga

SEQ ID NO: 407026 - DNA, 20 bp, Artificial Sequence
  Description of Artificial Sequence: Synthetic oligonucleotide
  Target: LAMA2; (+) strand; PAM type: YTN; PAM sequence: TTA
tatgcacctgctgaaaagaa

SEQ ID NO: 407027 - DNA, 20 bp, Artificial Sequence
  Description of Artificial Sequence: Synthetic oligonucleotide
  Target: LAMA2; (+) strand; PAM type: YTN; PAM sequence: CTG
ctgaaaagaattatgaaagt

SEQ ID NO: 407028 - DNA, 20 bp, Artificial Sequence
  Description of Artificial Sequence: Synthetic oligonucleotide
  Target: LAMA2; (+) strand; PAM type: YTN; PAM sequence: CTG
aaaagaattatgaaagtaat

SEQ ID NO: 407029 - DNA, 20 bp, Artificial Sequence
  Description of Artificial Sequence: Synthetic oligonucleotide
  Target: LAMA2; (+) strand; PAM type: YTN; PAM sequence: TTA
tgaaagtaattaaaggtaga

SEQ ID NO: 407030 - DNA, 20 bp, Artificial Sequence
  Description of Artificial Sequence: Synthetic oligonucleotide
  Target: LAMA2; (+) strand; PAM type: YTN; PAM sequence: TTA
aaggtagaagccagagttga

SEQ ID NO: 407031 - DNA, 20 bp, Artificial Sequence
  Description of Artificial Sequence: Synthetic oligonucleotide
  Target: LAMA2; (+) strand; PAM type: YTN; PAM sequence: TTG
aatgtggatcttgtaattgc

SEQ ID NO: 407032 - DNA, 20 bp, Artificial Sequence
  Description of Artificial Sequence: Synthetic oligonucleotide
  Target: LAMA2; (+) strand; PAM type: YTN; PAM sequence: CTT
gtaattgctgttctccttct

SEQ ID NO: 407033 - DNA, 20 bp, Artificial Sequence
  Description of Artificial Sequence: Synthetic oligonucleotide
  Target: LAMA2; (+) strand; PAM type: YTN; PAM sequence: TTG
taattgctgttctccttcta

SEQ ID NO: 407034 - DNA, 20 bp, Artificial Sequence
  Description of Artificial Sequence: Synthetic oligonucleotide
  Target: LAMA2; (+) strand; PAM type: YTN; PAM sequence: TTG
ctgttctccttctacattca

SEQ ID NO: 407035 - DNA, 20 bp, Artificial Sequence
  Description of Artificial Sequence: Synthetic oligonucleotide
  Target: LAMA2; (+) strand; PAM type: YTN; PAM sequence: CTG
ttctccttctacattcactg

SEQ ID NO: 407036 - DNA, 20 bp, Artificial Sequence
  Description of Artificial Sequence: Synthetic oligonucleotide
  Target: LAMA2; (+) strand; PAM type: YTN; PAM sequence: TTC
tccttctacattcactggag

SEQ ID NO: 407037 - DNA, 20 bp, Artificial Sequence
  Description of Artificial Sequence: Synthetic oligonucleotide
  Target: LAMA2; (+) strand; PAM type: YTN; PAM sequence: CTC
cttctacattcactggagat

SEQ ID NO: 407038 - DNA, 20 bp, Artificial Sequence
  Description of Artificial Sequence: Synthetic oligonucleotide
  Target: LAMA2; (+) strand; PAM type: YTN; PAM sequence: CTT
ctacattcactggagataat

SEQ ID NO: 407039 - DNA, 20 bp, Artificial Sequence
  Description of Artificial Sequence: Synthetic oligonucleotide
  Target: LAMA2; (+) strand; PAM type: YTN; PAM sequence: TTC
tacattcactggagataatg

SEQ ID NO: 407040 - DNA, 20 bp, Artificial Sequence
  Description of Artificial Sequence: Synthetic oligonucleotide
  Target: LAMA2; (+) strand; PAM type: YTN; PAM sequence: CTA
cattcactggagataatggc

SEQ ID NO: 407041 - DNA, 20 bp, Artificial Sequence
  Description of Artificial Sequence: Synthetic oligonucleotide
  Target: LAMA2; (+) strand; PAM type: YTN; PAM sequence: TTC
actggagataatggcactct

SEQ ID NO: 407042 - DNA, 20 bp, Artificial Sequence
  Description of Artificial Sequence: Synthetic oligonucleotide
  Target: LAMA2; (+) strand; PAM type: YTN; PAM sequence: CTG
gagataatggcactctgaca

SEQ ID NO: 407043 - DNA, 20 bp, Artificial Sequence
  Description of Artificial Sequence: Synthetic oligonucleotide
  Target: LAMA2; (+) strand; PAM type: YTN; PAM sequence: CTC
tgacattgcttagtgttccg

SEQ ID NO: 407044 - DNA, 20 bp, Artificial Sequence
  Description of Artificial Sequence: Synthetic oligonucleotide
  Target: LAMA2; (+) strand; PAM type: YTN; PAM sequence: CTG
acattgcttagtgttccgaa

SEQ ID NO: 407045 - DNA, 20 bp, Artificial Sequence
  Description of Artificial Sequence: Synthetic oligonucleotide
  Target: LAMA2; (+) strand; PAM type: YTN; PAM sequence: TTG
cttagtgttccgaaaattag

SEQ ID NO: 407046 - DNA, 20 bp, Artificial Sequence
  Description of Artificial Sequence: Synthetic oligonucleotide
  Target: LAMA2; (+) strand; PAM type: YTN; PAM sequence: CTT
agtgttccgaaaattagtca

SEQ ID NO: 407047 - DNA, 20 bp, Artificial Sequence
  Description of Artificial Sequence: Synthetic oligonucleotide
  Target: LAMA2; (+) strand; PAM type: YTN; PAM sequence: TTA
gtgttccgaaaattagtcag

SEQ ID NO: 407048 - DNA, 20 bp, Artificial Sequence
  Description of Artificial Sequence: Synthetic oligonucleotide
  Target: LAMA2; (+) strand; PAM type: YTN; PAM sequence: TTC
cgaaaattagtcagtgttcc

SEQ ID NO: 407049 - DNA, 20 bp, Artificial Sequence
  Description of Artificial Sequence: Synthetic oligonucleotide
  Target: LAMA2; (+) strand; PAM type: YTN; PAM sequence: TTA
gtcagtgttccaggatgcta

SEQ ID NO: 407050 - DNA, 20 bp, Artificial Sequence
  Description of Artificial Sequence: Synthetic oligonucleotide
  Target: LAMA2; (+) strand; PAM type: YTN; PAM sequence: TTC
caggatgctatgagtataac

SEQ ID NO: 407051 - DNA, 20 bp, Artificial Sequence
  Description of Artificial Sequence: Synthetic oligonucleotide
  Target: LAMA2; (+) strand; PAM type: YTN; PAM sequence: CTA
tgagtataacctattttatt

SEQ ID NO: 407052 - DNA, 20 bp, Artificial Sequence
  Description of Artificial Sequence: Synthetic oligonucleotide
  Target: LAMA2; (+) strand; PAM type: YTN; PAM sequence: CTA
ttttattgctaagcattagc

SEQ ID NO: 407053 - DNA, 20 bp, Artificial Sequence
  Description of Artificial Sequence: Synthetic oligonucleotide
  Target: LAMA2; (+) strand; PAM type: YTN; PAM sequence: TTT
tattgctaagcattagcatc

SEQ ID NO: 407054 - DNA, 20 bp, Artificial Sequence
  Description of Artificial Sequence: Synthetic oligonucleotide
  Target: LAMA2; (+) strand; PAM type: YTN; PAM sequence: TTT
attgctaagcattagcatca

SEQ ID NO: 407055 - DNA, 20 bp, Artificial Sequence
  Description of Artificial Sequence: Synthetic oligonucleotide
  Target: LAMA2; (+) strand; PAM type: YTN; PAM sequence: TTA
ttgctaagcattagcatcat

SEQ ID NO: 407056 - DNA, 20 bp, Artificial Sequence
  Description of Artificial Sequence: Synthetic oligonucleotide
  Target: LAMA2; (+) strand; PAM type: YTN; PAM sequence: TTG
ctaagcattagcatcataat

SEQ ID NO: 407057 - DNA, 20 bp, Artificial Sequence
  Description of Artificial Sequence: Synthetic oligonucleotide
  Target: LAMA2; (+) strand; PAM type: YTN; PAM sequence: CTA
agcattagcatcataatggc

SEQ ID NO: 407058 - DNA, 20 bp, Artificial Sequence
  Description of Artificial Sequence: Synthetic oligonucleotide
  Target: LAMA2; (+) strand; PAM type: YTN; PAM sequence: TTA
gcatcataatggcgtgttgg

SEQ ID NO: 407059 - DNA, 20 bp, Artificial Sequence
  Description of Artificial Sequence: Synthetic oligonucleotide
  Target: LAMA2; (+) strand; PAM type: YTN; PAM sequence: TTG
gagctttcccatatgcctaa

SEQ ID NO: 407060 - DNA, 20 bp, Artificial Sequence
  Description of Artificial Sequence: Synthetic oligonucleotide
  Target: LAMA2; (+) strand; PAM type: YTN; PAM sequence: CTT
tcccatatgcctaatacaag

SEQ ID NO: 407061 - DNA, 20 bp, Artificial Sequence
  Description of Artificial Sequence: Synthetic oligonucleotide
  Target: LAMA2; (+) strand; PAM type: YTN; PAM sequence: TTT
cccatatgcctaatacaaga

SEQ ID NO: 407062 - DNA, 20 bp, Artificial Sequence
  Description of Artificial Sequence: Synthetic oligonucleotide
  Target: LAMA2; (+) strand; PAM type: YTN; PAM sequence: TTC
ccatatgcctaatacaagaa

SEQ ID NO: 407063 - DNA, 20 bp, Artificial Sequence
  Description of Artificial Sequence: Synthetic oligonucleotide
  Target: LAMA2; (+) strand; PAM type: YTN; PAM sequence: CTA
atacaagaactatattagtt

SEQ ID NO: 407064 - DNA, 20 bp, Artificial Sequence
  Description of Artificial Sequence: Synthetic oligonucleotide
  Target: LAMA2; (+) strand; PAM type: YTN; PAM sequence: CTA
tattagttgttctcatgccc

SEQ ID NO: 407065 - DNA, 20 bp, Artificial Sequence
  Description of Artificial Sequence: Synthetic oligonucleotide
  Target: LAMA2; (+) strand; PAM type: YTN; PAM sequence: TTA
gttgttctcatgcccatgcc

SEQ ID NO: 407066 - DNA, 20 bp, Artificial Sequence
  Description of Artificial Sequence: Synthetic oligonucleotide
  Target: LAMA2; (+) strand; PAM type: YTN; PAM sequence: TTG
ttctcatgcccatgccaaca

SEQ ID NO: 407067 - DNA, 20 bp, Artificial Sequence
  Description of Artificial Sequence: Synthetic oligonucleotide
  Target: LAMA2; (+) strand; PAM type: YTN; PAM sequence: TTC
tcatgcccatgccaacattt

SEQ ID NO: 407068 - DNA, 20 bp, Artificial Sequence
  Description of Artificial Sequence: Synthetic oligonucleotide
  Target: LAMA2; (+) strand; PAM type: YTN; PAM sequence: CTC
atgcccatgccaacattttt

SEQ ID NO: 407069 - DNA, 20 bp, Artificial Sequence
  Description of Artificial Sequence: Synthetic oligonucleotide
  Target: LAMA2; (+) strand; PAM type: YTN; PAM sequence: TTT
ttttttaatttcacatatgc

SEQ ID NO: 407070 - DNA, 20 bp, Artificial Sequence
  Description of Artificial Sequence: Synthetic oligonucleotide
  Target: LAMA2; (+) strand; PAM type: YTN; PAM sequence: TTT
tttttaatttcacatatgct

SEQ ID NO: 407071 - DNA, 20 bp, Artificial Sequence
  Description of Artificial Sequence: Synthetic oligonucleotide
  Target: LAMA2; (+) strand; PAM type: YTN; PAM sequence: TTT
ttttaatttcacatatgctt

SEQ ID NO: 407072 - DNA, 20 bp, Artificial Sequence
  Description of Artificial Sequence: Synthetic oligonucleotide
  Target: LAMA2; (+) strand; PAM type: YTN; PAM sequence: TTT
tttaatttcacatatgcttt

SEQ ID NO: 407073 - DNA, 20 bp, Artificial Sequence
  Description of Artificial Sequence: Synthetic oligonucleotide
  Target: LAMA2; (+) strand; PAM type: YTN; PAM sequence: TTT
ttaatttcacatatgctttt

SEQ ID NO: 407074 - DNA, 20 bp, Artificial Sequence
  Description of Artificial Sequence: Synthetic oligonucleotide
  Target: LAMA2; (+) strand; PAM type: YTN; PAM sequence: TTT
taatttcacatatgcttttt

SEQ ID NO: 407075 - DNA, 20 bp, Artificial Sequence
  Description of Artificial Sequence: Synthetic oligonucleotide
  Target: LAMA2; (+) strand; PAM type: YTN; PAM sequence: TTT
aatttcacatatgcttttta

SEQ ID NO: 407076 - DNA, 20 bp, Artificial Sequence
  Description of Artificial Sequence: Synthetic oligonucleotide
  Target: LAMA2; (+) strand; PAM type: YTN; PAM sequence: TTA
atttcacatatgctttttag

SEQ ID NO: 407077 - DNA, 20 bp, Artificial Sequence
  Description of Artificial Sequence: Synthetic oligonucleotide
  Target: LAMA2; (+) strand; PAM type: YTN; PAM sequence: TTT
cacatatgctttttagctag

SEQ ID NO: 407078 - DNA, 20 bp, Artificial Sequence
  Description of Artificial Sequence: Synthetic oligonucleotide
  Target: LAMA2; (+) strand; PAM type: YTN; PAM sequence: TTC
acatatgctttttagctagc

SEQ ID NO: 407079 - DNA, 20 bp, Artificial Sequence
  Description of Artificial Sequence: Synthetic oligonucleotide
  Target: LAMA2; (+) strand; PAM type: YTN; PAM sequence: CTT
tttagctagcagtatgggga

SEQ ID NO: 407080 - DNA, 20 bp, Artificial Sequence
  Description of Artificial Sequence: Synthetic oligonucleotide
  Target: LAMA2; (+) strand; PAM type: YTN; PAM sequence: TTT
ttagctagcagtatggggag

SEQ ID NO: 407081 - DNA, 20 bp, Artificial Sequence
  Description of Artificial Sequence: Synthetic oligonucleotide
  Target: LAMA2; (+) strand; PAM type: YTN; PAM sequence: TTT
tagctagcagtatggggaga

SEQ ID NO: 407082 - DNA, 20 bp, Artificial Sequence
  Description of Artificial Sequence: Synthetic oligonucleotide
  Target: LAMA2; (+) strand; PAM type: YTN; PAM sequence: TTT
agctagcagtatggggagac

SEQ ID NO: 407083 - DNA, 20 bp, Artificial Sequence
  Description of Artificial Sequence: Synthetic oligonucleotide
  Target: LAMA2; (+) strand; PAM type: YTN; PAM sequence: TTA
gctagcagtatggggagaca

SEQ ID NO: 407084 - DNA, 20 bp, Artificial Sequence
  Description of Artificial Sequence: Synthetic oligonucleotide
  Target: LAMA2; (+) strand; PAM type: YTN; PAM sequence: CTA
gcagtatggggagacacatt

SEQ ID NO: 407085 - DNA, 20 bp, Artificial Sequence
  Description of Artificial Sequence: Synthetic oligonucleotide
  Target: LAMA2; (+) strand; PAM type: YTN; PAM sequence: TTT
gcttcctaatttagttagtt

SEQ ID NO: 407086 - DNA, 20 bp, Artificial Sequence
  Description of Artificial Sequence: Synthetic oligonucleotide
  Target: LAMA2; (+) strand; PAM type: YTN; PAM sequence: TTG
cttcctaatttagttagttc

SEQ ID NO: 407087 - DNA, 20 bp, Artificial Sequence
  Description of Artificial Sequence: Synthetic oligonucleotide
  Target: LAMA2; (+) strand; PAM type: YTN; PAM sequence: CTT
cctaatttagttagttcaaa

SEQ ID NO: 407088 - DNA, 20 bp, Artificial Sequence
  Description of Artificial Sequence: Synthetic oligonucleotide
  Target: LAMA2; (+) strand; PAM type: YTN; PAM sequence: TTC
ctaatttagttagttcaaaa

SEQ ID NO: 407089 - DNA, 20 bp, Artificial Sequence
  Description of Artificial Sequence: Synthetic oligonucleotide
  Target: LAMA2; (+) strand; PAM type: YTN; PAM sequence: CTA
atttagttagttcaaaaaat

SEQ ID NO: 407090 - DNA, 20 bp, Artificial Sequence
  Description of Artificial Sequence: Synthetic oligonucleotide
  Target: LAMA2; (+) strand; PAM type: YTN; PAM sequence: TTT
agttagttcaaaaaataaag

SEQ ID NO: 407091 - DNA, 20 bp, Artificial Sequence
  Description of Artificial Sequence: Synthetic oligonucleotide
  Target: LAMA2; (+) strand; PAM type: YTN; PAM sequence: TTA
gttagttcaaaaaataaagt

SEQ ID NO: 407092 - DNA, 20 bp, Artificial Sequence
  Description of Artificial Sequence: Synthetic oligonucleotide
  Target: LAMA2; (+) strand; PAM type: YTN; PAM sequence: TTA
gttcaaaaaataaagtaact

SEQ ID NO: 407093 - DNA, 20 bp, Artificial Sequence
  Description of Artificial Sequence: Synthetic oligonucleotide
  Target: LAMA2; (+) strand; PAM type: YTN; PAM sequence: TTC
aaaaaataaagtaactaaaa

SEQ ID NO: 407094 - DNA, 20 bp, Artificial Sequence
  Description of Artificial Sequence: Synthetic oligonucleotide
  Target: LAMA2; (+) strand; PAM type: YTN; PAM sequence: CTA
aaaaatgtcagaaaatactc

SEQ ID NO: 407095 - DNA, 20 bp, Artificial Sequence
  Description of Artificial Sequence: Synthetic oligonucleotide
  Target: LAMA2; (+) strand; PAM type: YTN; PAM sequence: CTC
acgtgctgtgtagttaattt

SEQ ID NO: 407096 - DNA, 20 bp, Artificial Sequence
  Description of Artificial Sequence: Synthetic oligonucleotide
  Target: LAMA2; (+) strand; PAM type: YTN; PAM sequence: CTG
tgtagttaatttactgctca

SEQ ID NO: 407097 - DNA, 20 bp, Artificial Sequence
  Description of Artificial Sequence: Synthetic oligonucleotide
  Target: LAMA2; (+) strand; PAM type: YTN; PAM sequence: TTA
atttactgctcattataaaa

SEQ ID NO: 407098 - DNA, 20 bp, Artificial Sequence
  Description of Artificial Sequence: Synthetic oligonucleotide
  Target: LAMA2; (+) strand; PAM type: YTN; PAM sequence: TTT
actgctcattataaaacata

SEQ ID NO: 407099 - DNA, 20 bp, Artificial Sequence
  Description of Artificial Sequence: Synthetic oligonucleotide
  Target: LAMA2; (+) strand; PAM type: YTN; PAM sequence: TTA
ctgctcattataaaacataa

SEQ ID NO: 407100 - DNA, 20 bp, Artificial Sequence
  Description of Artificial Sequence: Synthetic oligonucleotide
  Target: LAMA2; (+) strand; PAM type: YTN; PAM sequence: CTG
ctcattataaaacataacat

SEQ ID NO: 407101 - DNA, 20 bp, Artificial Sequence
  Description of Artificial Sequence: Synthetic oligonucleotide
  Target: LAMA2; (+) strand; PAM type: YTN; PAM sequence: CTC
attataaaacataacatagt

SEQ ID NO: 407102 - DNA, 20 bp, Artificial Sequence
  Description of Artificial Sequence: Synthetic oligonucleotide
  Target: LAMA2; (+) strand; PAM type: YTN; PAM sequence: TTA
taaaacataacatagtctat

SEQ ID NO: 407103 - DNA, 20 bp, Artificial Sequence
  Description of Artificial Sequence: Synthetic oligonucleotide
  Target: LAMA2; (+) strand; PAM type: YTN; PAM sequence: CTA
taaggatggtacttggtgct

SEQ ID NO: 407104 - DNA, 20 bp, Artificial Sequence
  Description of Artificial Sequence: Synthetic oligonucleotide
  Target: LAMA2; (+) strand; PAM type: YTN; PAM sequence: CTT
ggtgctcaataaatgttaat

SEQ ID NO: 407105 - DNA, 20 bp, Artificial Sequence
  Description of Artificial Sequence: Synthetic oligonucleotide
  Target: LAMA2; (+) strand; PAM type: YTN; PAM sequence: TTG
gtgctcaataaatgttaatt

SEQ ID NO: 407106 - DNA, 20 bp, Artificial Sequence
  Description of Artificial Sequence: Synthetic oligonucleotide
  Target: LAMA2; (+) strand; PAM type: YTN; PAM sequence: CTC
aataaatgttaattacactc

SEQ ID NO: 407107 - DNA, 20 bp, Artificial Sequence
  Description of Artificial Sequence: Synthetic oligonucleotide
  Target: LAMA2; (+) strand; PAM type: YTN; PAM sequence: TTA
attacactctaattagaatg

SEQ ID NO: 407108 - DNA, 20 bp, Artificial Sequence
  Description of Artificial Sequence: Synthetic oligonucleotide
  Target: LAMA2; (+) strand; PAM type: YTN; PAM sequence: TTA
cactctaattagaatgggat

SEQ ID NO: 407109 - DNA, 20 bp, Artificial Sequence
  Description of Artificial Sequence: Synthetic oligonucleotide
  Target: LAMA2; (+) strand; PAM type: YTN; PAM sequence: CTC
taattagaatgggattaatt

SEQ ID NO: 407110 - DNA, 20 bp, Artificial Sequence
  Description of Artificial Sequence: Synthetic oligonucleotide
  Target: LAMA2; (+) strand; PAM type: YTN; PAM sequence: CTA
attagaatgggattaattga

SEQ ID NO: 407111 - DNA, 20 bp, Artificial Sequence
  Description of Artificial Sequence: Synthetic oligonucleotide
  Target: LAMA2; (+) strand; PAM type: YTN; PAM sequence: TTA
gaatgggattaattgatttg

SEQ ID NO: 407112 - DNA, 20 bp, Artificial Sequence
  Description of Artificial Sequence: Synthetic oligonucleotide
  Target: LAMA2; (+) strand; PAM type: YTN; PAM sequence: TTA
attgatttggttaaaccgta

SEQ ID NO: 407113 - DNA, 20 bp, Artificial Sequence
  Description of Artificial Sequence: Synthetic oligonucleotide
  Target: LAMA2; (+) strand; PAM type: YTN; PAM sequence: TTG
atttggttaaaccgtaagag

SEQ ID NO: 407114 - DNA, 20 bp, Artificial Sequence
  Description of Artificial Sequence: Synthetic oligonucleotide
  Target: LAMA2; (+) strand; PAM type: YTN; PAM sequence: TTT
ggttaaaccgtaagagttta

SEQ ID NO: 407115 - DNA, 20 bp, Artificial Sequence
  Description of Artificial Sequence: Synthetic oligonucleotide
  Target: LAMA2; (+) strand; PAM type: YTN; PAM sequence: TTG
gttaaaccgtaagagtttat

SEQ ID NO: 407116 - DNA, 20 bp, Artificial Sequence
  Description of Artificial Sequence: Synthetic oligonucleotide
  Target: LAMA2; (+) strand; PAM type: YTN; PAM sequence: TTA
aaccgtaagagtttattaca

SEQ ID NO: 407117 - DNA, 20 bp, Artificial Sequence
  Description of Artificial Sequence: Synthetic oligonucleotide
  Target: LAMA2; (+) strand; PAM type: YTN; PAM sequence: TTT
attacagactaccatgtttt

SEQ ID NO: 407118 - DNA, 20 bp, Artificial Sequence
  Description of Artificial Sequence: Synthetic oligonucleotide
  Target: LAMA2; (+) strand; PAM type: YTN; PAM sequence: TTA
ttacagactaccatgttttt

SEQ ID NO: 407119 - DNA, 20 bp, Artificial Sequence
  Description of Artificial Sequence: Synthetic oligonucleotide
  Target: LAMA2; (+) strand; PAM type: YTN; PAM sequence: TTA
cagactaccatgtttttaat

SEQ ID NO: 407120 - DNA, 20 bp, Artificial Sequence
  Description of Artificial Sequence: Synthetic oligonucleotide
  Target: LAMA2; (+) strand; PAM type: YTN; PAM sequence: CTA
ccatgtttttaattttttgt

SEQ ID NO: 407121 - DNA, 20 bp, Artificial Sequence
  Description of Artificial Sequence: Synthetic oligonucleotide
  Target: LAMA2; (+) strand; PAM type: YTN; PAM sequence: TTT
ttaattttttgttttgttta

SEQ ID NO: 407122 - DNA, 20 bp, Artificial Sequence
  Description of Artificial Sequence: Synthetic oligonucleotide
  Target: LAMA2; (+) strand; PAM type: YTN; PAM sequence: TTT
taattttttgttttgtttaa

SEQ ID NO: 407123 - DNA, 20 bp, Artificial Sequence
  Description of Artificial Sequence: Synthetic oligonucleotide
  Target: LAMA2; (+) strand; PAM type: YTN; PAM sequence: TTT
aattttttgttttgtttaat

SEQ ID NO: 407124 - DNA, 20 bp, Artificial Sequence
  Description of Artificial Sequence: Synthetic oligonucleotide
  Target: LAMA2; (+) strand; PAM type: YTN; PAM sequence: TTA
attttttgttttgtttaatt

SEQ ID NO: 407125 - DNA, 20 bp, Artificial Sequence
  Description of Artificial Sequence: Synthetic oligonucleotide
  Target: LAMA2; (+) strand; PAM type: YTN; PAM sequence: TTT
tttgttttgtttaattagtt

SEQ ID NO: 407126 - DNA, 20 bp, Artificial Sequence
  Description of Artificial Sequence: Synthetic oligonucleotide
  Target: LAMA2; (+) strand; PAM type: YTN; PAM sequence: TTT
ttgttttgtttaattagttt

SEQ ID NO: 407127 - DNA, 20 bp, Artificial Sequence
  Description of Artificial Sequence: Synthetic oligonucleotide
  Target: LAMA2; (+) strand; PAM type: YTN; PAM sequence: TTT
tgttttgtttaattagtttg

SEQ ID NO: 407128 - DNA, 20 bp, Artificial Sequence
  Description of Artificial Sequence: Synthetic oligonucleotide
  Target: LAMA2; (+) strand; PAM type: YTN; PAM sequence: TTT
gttttgtttaattagtttgg

SEQ ID NO: 407129 - DNA, 20 bp, Artificial Sequence
  Description of Artificial Sequence: Synthetic oligonucleotide
  Target: LAMA2; (+) strand; PAM type: YTN; PAM sequence: TTG
ttttgtttaattagtttggt

SEQ ID NO: 407130 - DNA, 20 bp, Artificial Sequence
  Description of Artificial Sequence: Synthetic oligonucleotide
  Target: LAMA2; (+) strand; PAM type: YTN; PAM sequence: TTT
tgtttaattagtttggtatt

SEQ ID NO: 407131 - DNA, 20 bp, Artificial Sequence
  Description of Artificial Sequence: Synthetic oligonucleotide
  Target: LAMA2; (+) strand; PAM type: YTN; PAM sequence: TTT
gtttaattagtttggtattt

SEQ ID NO: 407132 - DNA, 20 bp, Artificial Sequence
  Description of Artificial Sequence: Synthetic oligonucleotide
  Target: LAMA2; (+) strand; PAM type: YTN; PAM sequence: TTG
tttaattagtttggtatttt

SEQ ID NO: 407133 - DNA, 20 bp, Artificial Sequence
  Description of Artificial Sequence: Synthetic oligonucleotide
  Target: LAMA2; (+) strand; PAM type: YTN; PAM sequence: TTT
aattagtttggtatttttta

SEQ ID NO: 407134 - DNA, 20 bp, Artificial Sequence
  Description of Artificial Sequence: Synthetic oligonucleotide
  Target: LAMA2; (+) strand; PAM type: YTN; PAM sequence: TTA
attagtttggtattttttaa

SEQ ID NO: 407135 - DNA, 20 bp, Artificial Sequence
  Description of Artificial Sequence: Synthetic oligonucleotide
  Target: LAMA2; (+) strand; PAM type: YTN; PAM sequence: TTA
gtttggtattttttaaaggg

SEQ ID NO: 407136 - DNA, 20 bp, Artificial Sequence
  Description of Artificial Sequence: Synthetic oligonucleotide
  Target: LAMA2; (+) strand; PAM type: YTN; PAM sequence: TTT
ggtattttttaaagggtata

SEQ ID NO: 407137 - DNA, 20 bp, Artificial Sequence
  Description of Artificial Sequence: Synthetic oligonucleotide
  Target: LAMA2; (+) strand; PAM type: YTN; PAM sequence: TTG
gtattttttaaagggtataa

SEQ ID NO: 407138 - DNA, 20 bp, Artificial Sequence
  Description of Artificial Sequence: Synthetic oligonucleotide
  Target: LAMA2; (+) strand; PAM type: YTN; PAM sequence: TTT
tttaaagggtataaaagttc

SEQ ID NO: 407139 - DNA, 20 bp, Artificial Sequence
  Description of Artificial Sequence: Synthetic oligonucleotide
  Target: LAMA2; (+) strand; PAM type: YTN; PAM sequence: TTT
ttaaagggtataaaagttct

SEQ ID NO: 407140 - DNA, 20 bp, Artificial Sequence
  Description of Artificial Sequence: Synthetic oligonucleotide
  Target: LAMA2; (+) strand; PAM type: YTN; PAM sequence: TTT
taaagggtataaaagttctg

SEQ ID NO: 407141 - DNA, 20 bp, Artificial Sequence
  Description of Artificial Sequence: Synthetic oligonucleotide
  Target: LAMA2; (+) strand; PAM type: YTN; PAM sequence: TTT
aaagggtataaaagttctgt

SEQ ID NO: 407142 - DNA, 20 bp, Artificial Sequence
  Description of Artificial Sequence: Synthetic oligonucleotide
  Target: LAMA2; (+) strand; PAM type: YTN; PAM sequence: TTA
aagggtataaaagttctgtc

SEQ ID NO: 407143 - DNA, 20 bp, Artificial Sequence
  Description of Artificial Sequence: Synthetic oligonucleotide
  Target: LAMA2; (+) strand; PAM type: YTN; PAM sequence: TTC
tgtccaggtgtttctactcc

SEQ ID NO: 407144 - DNA, 20 bp, Artificial Sequence
  Description of Artificial Sequence: Synthetic oligonucleotide
  Target: LAMA2; (+) strand; PAM type: YTN; PAM sequence: CTG
tccaggtgtttctactccaa

SEQ ID NO: 407145 - DNA, 20 bp, Artificial Sequence
  Description of Artificial Sequence: Synthetic oligonucleotide
  Target: LAMA2; (+) strand; PAM type: YTN; PAM sequence: TTT
ctactccaaaaagacagatt

SEQ ID NO: 407146 - DNA, 20 bp, Artificial Sequence
  Description of Artificial Sequence: Synthetic oligonucleotide
  Target: LAMA2; (+) strand; PAM type: YTN; PAM sequence: TTC
tactccaaaaagacagatta

SEQ ID NO: 407147 - DNA, 20 bp, Artificial Sequence
  Description of Artificial Sequence: Synthetic oligonucleotide
  Target: LAMA2; (+) strand; PAM type: YTN; PAM sequence: CTA
ctccaaaaagacagattatg

SEQ ID NO: 407148 - DNA, 20 bp, Artificial Sequence
  Description of Artificial Sequence: Synthetic oligonucleotide
  Target: LAMA2; (+) strand; PAM type: YTN; PAM sequence: CTC
caaaaagacagattatgttt

SEQ ID NO: 407149 - DNA, 20 bp, Artificial Sequence
  Description of Artificial Sequence: Synthetic oligonucleotide
  Target: LAMA2; (+) strand; PAM type: YTN; PAM sequence: TTA
tgtttggaaaaatcccagaa

SEQ ID NO: 407150 - DNA, 20 bp, Artificial Sequence
  Description of Artificial Sequence: Synthetic oligonucleotide
  Target: LAMA2; (+) strand; PAM type: YTN; PAM sequence: TTT
ggaaaaatcccagaatagct

SEQ ID NO: 407151 - DNA, 20 bp, Artificial Sequence
  Description of Artificial Sequence: Synthetic oligonucleotide
  Target: LAMA2; (+) strand; PAM type: YTN; PAM sequence: TTG
gaaaaatcccagaatagctg

SEQ ID NO: 407152 - DNA, 20 bp, Artificial Sequence
  Description of Artificial Sequence: Synthetic oligonucleotide
  Target: LAMA2; (+) strand; PAM type: YTN; PAM sequence: CTG
aaaagtgtgatggtcagtta

SEQ ID NO: 407153 - DNA, 20 bp, Artificial Sequence
  Description of Artificial Sequence: Synthetic oligonucleotide
  Target: LAMA2; (+) strand; PAM type: YTN; PAM sequence: TTA
ttttcacatttctaaacgag

SEQ ID NO: 407154 - DNA, 20 bp, Artificial Sequence
  Description of Artificial Sequence: Synthetic oligonucleotide
  Target: LAMA2; (+) strand; PAM type: YTN; PAM sequence: TTT
tcacatttctaaacgagcag

SEQ ID NO: 407155 - DNA, 20 bp, Artificial Sequence
  Description of Artificial Sequence: Synthetic oligonucleotide
  Target: LAMA2; (+) strand; PAM type: YTN; PAM sequence: TTT
cacatttctaaacgagcagt

SEQ ID NO: 407156 - DNA, 20 bp, Artificial Sequence
  Description of Artificial Sequence: Synthetic oligonucleotide
  Target: LAMA2; (+) strand; PAM type: YTN; PAM sequence: TTC
acatttctaaacgagcagtg

SEQ ID NO: 407157 - DNA, 20 bp, Artificial Sequence
  Description of Artificial Sequence: Synthetic oligonucleotide
  Target: LAMA2; (+) strand; PAM type: YTN; PAM sequence: TTT
ctaaacgagcagtgaaagtt

SEQ ID NO: 407158 - DNA, 20 bp, Artificial Sequence
  Description of Artificial Sequence: Synthetic oligonucleotide
  Target: LAMA2; (+) strand; PAM type: YTN; PAM sequence: TTC
taaacgagcagtgaaagttc

SEQ ID NO: 407159 - DNA, 20 bp, Artificial Sequence
  Description of Artificial Sequence: Synthetic oligonucleotide
  Target: LAMA2; (+) strand; PAM type: YTN; PAM sequence: CTA
aacgagcagtgaaagttcag

SEQ ID NO: 407160 - DNA, 20 bp, Artificial Sequence
  Description of Artificial Sequence: Synthetic oligonucleotide
  Target: LAMA2; (+) strand; PAM type: YTN; PAM sequence: TTC
agtctcattctatgacagct

SEQ ID NO: 407161 - DNA, 20 bp, Artificial Sequence
  Description of Artificial Sequence: Synthetic oligonucleotide
  Target: LAMA2; (+) strand; PAM type: YTN; PAM sequence: CTC
attctatgacagctagtgtg

SEQ ID NO: 407162 - DNA, 20 bp, Artificial Sequence
  Description of Artificial Sequence: Synthetic oligonucleotide
  Target: LAMA2; (+) strand; PAM type: YTN; PAM sequence: TTC
tatgacagctagtgtgcagg

SEQ ID NO: 407163 - DNA, 20 bp, Artificial Sequence
  Description of Artificial Sequence: Synthetic oligonucleotide
  Target: LAMA2; (+) strand; PAM type: YTN; PAM sequence: CTA
tgacagctagtgtgcaggct

SEQ ID NO: 407164 - DNA, 20 bp, Artificial Sequence
  Description of Artificial Sequence: Synthetic oligonucleotide
  Target: LAMA2; (+) strand; PAM type: YTN; PAM sequence: CTA
gtgtgcaggctgaaatttct

SEQ ID NO: 407165 - DNA, 20 bp, Artificial Sequence
  Description of Artificial Sequence: Synthetic oligonucleotide
  Target: LAMA2; (+) strand; PAM type: YTN; PAM sequence: CTG
aaatttcttctccccaaatc

SEQ ID NO: 407166 - DNA, 20 bp, Artificial Sequence
  Description of Artificial Sequence: Synthetic oligonucleotide
  Target: LAMA2; (+) strand; PAM type: YTN; PAM sequence: TTT
cttctccccaaatctaaact

SEQ ID NO: 407167 - DNA, 20 bp, Artificial Sequence
  Description of Artificial Sequence: Synthetic oligonucleotide
  Target: LAMA2; (+) strand; PAM type: YTN; PAM sequence: TTC
ttctccccaaatctaaactc

SEQ ID NO: 407168 - DNA, 20 bp, Artificial Sequence
  Description of Artificial Sequence: Synthetic oligonucleotide
  Target: LAMA2; (+) strand; PAM type: YTN; PAM sequence: CTT
ctccccaaatctaaactcat

SEQ ID NO: 407169 - DNA, 20 bp, Artificial Sequence
  Description of Artificial Sequence: Synthetic oligonucleotide
  Target: LAMA2; (+) strand; PAM type: YTN; PAM sequence: TTC
tccccaaatctaaactcata

SEQ ID NO: 407170 - DNA, 20 bp, Artificial Sequence
  Description of Artificial Sequence: Synthetic oligonucleotide
  Target: LAMA2; (+) strand; PAM type: YTN; PAM sequence: CTC
cccaaatctaaactcataga

SEQ ID NO: 407171 - DNA, 20 bp, Artificial Sequence
  Description of Artificial Sequence: Synthetic oligonucleotide
  Target: LAMA2; (+) strand; PAM type: YTN; PAM sequence: CTA
aactcatagatgaagcaact

SEQ ID NO: 407172 - DNA, 20 bp, Artificial Sequence
  Description of Artificial Sequence: Synthetic oligonucleotide
  Target: LAMA2; (+) strand; PAM type: YTN; PAM sequence: CTC
atagatgaagcaactgtcta

SEQ ID NO: 407173 - DNA, 20 bp, Artificial Sequence
  Description of Artificial Sequence: Synthetic oligonucleotide
  Target: LAMA2; (+) strand; PAM type: YTN; PAM sequence: CTG
tctaattatctgatgagctt

SEQ ID NO: 407174 - DNA, 20 bp, Artificial Sequence
  Description of Artificial Sequence: Synthetic oligonucleotide
  Target: LAMA2; (+) strand; PAM type: YTN; PAM sequence: CTA
attatctgatgagcttcatg

SEQ ID NO: 407175 - DNA, 20 bp, Artificial Sequence
  Description of Artificial Sequence: Synthetic oligonucleotide
  Target: LAMA2; (+) strand; PAM type: YTN; PAM sequence: TTA
tctgatgagcttcatggtgc

SEQ ID NO: 407176 - DNA, 20 bp, Artificial Sequence
  Description of Artificial Sequence: Synthetic oligonucleotide
  Target: LAMA2; (+) strand; PAM type: YTN; PAM sequence: CTG
atgagcttcatggtgcaaat

SEQ ID NO: 407177 - DNA, 20 bp, Artificial Sequence
  Description of Artificial Sequence: Synthetic oligonucleotide
  Target: LAMA2; (+) strand; PAM type: YTN; PAM sequence: CTT
catggtgcaaataaattggc

SEQ ID NO: 407178 - DNA, 20 bp, Artificial Sequence
  Description of Artificial Sequence: Synthetic oligonucleotide
  Target: LAMA2; (+) strand; PAM type: YTN; PAM sequence: TTC
atggtgcaaataaattggct

SEQ ID NO: 407179 - DNA, 20 bp, Artificial Sequence
  Description of Artificial Sequence: Synthetic oligonucleotide
  Target: LAMA2; (+) strand; PAM type: YTN; PAM sequence: TTG
gctctgcattcattgtaatg

SEQ ID NO: 407180 - DNA, 20 bp, Artificial Sequence
  Description of Artificial Sequence: Synthetic oligonucleotide
  Target: LAMA2; (+) strand; PAM type: YTN; PAM sequence: CTC
tgcattcattgtaatgtatt

SEQ ID NO: 407181 - DNA, 20 bp, Artificial Sequence
  Description of Artificial Sequence: Synthetic oligonucleotide
  Target: LAMA2; (+) strand; PAM type: YTN; PAM sequence: CTG
cattcattgtaatgtatttg

SEQ ID NO: 407182 - DNA, 20 bp, Artificial Sequence
  Description of Artificial Sequence: Synthetic oligonucleotide
  Target: LAMA2; (+) strand; PAM type: YTN; PAM sequence: TTC
attgtaatgtatttgtgtta

SEQ ID NO: 407183 - DNA, 20 bp, Artificial Sequence
  Description of Artificial Sequence: Synthetic oligonucleotide
  Target: LAMA2; (+) strand; PAM type: YTN; PAM sequence: TTG
taatgtatttgtgttagaaa

SEQ ID NO: 407184 - DNA, 20 bp, Artificial Sequence
  Description of Artificial Sequence: Synthetic oligonucleotide
  Target: LAMA2; (+) strand; PAM type: YTN; PAM sequence: TTT
gtgttagaaaaataaattta

SEQ ID NO: 407185 - DNA, 20 bp, Artificial Sequence
  Description of Artificial Sequence: Synthetic oligonucleotide
  Target: LAMA2; (+) strand; PAM type: YTN; PAM sequence: TTG
tgttagaaaaataaatttaa

SEQ ID NO: 407186 - DNA, 20 bp, Artificial Sequence
  Description of Artificial Sequence: Synthetic oligonucleotide
  Target: LAMA2; (+) strand; PAM type: YTN; PAM sequence: TTA
gaaaaataaatttaaagtgt

SEQ ID NO: 407187 - DNA, 20 bp, Artificial Sequence
  Description of Artificial Sequence: Synthetic oligonucleotide
  Target: LAMA2; (+) strand; PAM type: YTN; PAM sequence: TTT
aaagtgtcaagtcagaaaaa

SEQ ID NO: 407188 - DNA, 20 bp, Artificial Sequence
  Description of Artificial Sequence: Synthetic oligonucleotide
  Target: LAMA2; (+) strand; PAM type: YTN; PAM sequence: TTA
aagtgtcaagtcagaaaaac

SEQ ID NO: 407189 - DNA, 20 bp, Artificial Sequence
  Description of Artificial Sequence: Synthetic oligonucleotide
  Target: LAMA2; (+) strand; PAM type: YTN; PAM sequence: TTA
caaatcaaatttaaatagta

SEQ ID NO: 407190 - DNA, 20 bp, Artificial Sequence
  Description of Artificial Sequence: Synthetic oligonucleotide
  Target: LAMA2; (+) strand; PAM type: YTN; PAM sequence: TTT
aaatagtaccacagttatta

SEQ ID NO: 407191 - DNA, 20 bp, Artificial Sequence
  Description of Artificial Sequence: Synthetic oligonucleotide
  Target: LAMA2; (+) strand; PAM type: YTN; PAM sequence: TTA
aatagtaccacagttattac

SEQ ID NO: 407192 - DNA, 20 bp, Artificial Sequence
  Description of Artificial Sequence: Synthetic oligonucleotide
  Target: LAMA2; (+) strand; PAM type: YTN; PAM sequence: TTA
ttacctagaaattcatttgc

SEQ ID NO: 407193 - DNA, 20 bp, Artificial Sequence
  Description of Artificial Sequence: Synthetic oligonucleotide
  Target: LAMA2; (+) strand; PAM type: YTN; PAM sequence: TTA
cctagaaattcatttgccag

SEQ ID NO: 407194 - DNA, 20 bp, Artificial Sequence
  Description of Artificial Sequence: Synthetic oligonucleotide
  Target: LAMA2; (+) strand; PAM type: YTN; PAM sequence: CTA
gaaattcatttgccagtcat

SEQ ID NO: 407195 - DNA, 20 bp, Artificial Sequence
  Description of Artificial Sequence: Synthetic oligonucleotide
  Target: LAMA2; (+) strand; PAM type: YTN; PAM sequence: TTC
atttgccagtcattcaccaa

SEQ ID NO: 407196 - DNA, 20 bp, Artificial Sequence
  Description of Artificial Sequence: Synthetic oligonucleotide
  Target: LAMA2; (+) strand; PAM type: YTN; PAM sequence: TTT
gccagtcattcaccaaaagt

SEQ ID NO: 407197 - DNA, 20 bp, Artificial Sequence
  Description of Artificial Sequence: Synthetic oligonucleotide
  Target: LAMA2; (+) strand; PAM type: YTN; PAM sequence: TTG
ccagtcattcaccaaaagtt

SEQ ID NO: 407198 - DNA, 20 bp, Artificial Sequence
  Description of Artificial Sequence: Synthetic oligonucleotide
  Target: LAMA2; (+) strand; PAM type: YTN; PAM sequence: TTC
accaaaagtttgttgagtat

SEQ ID NO: 407199 - DNA, 20 bp, Artificial Sequence
  Description of Artificial Sequence: Synthetic oligonucleotide
  Target: LAMA2; (+) strand; PAM type: YTN; PAM sequence: TTT
gttgagtatctactatgtga

SEQ ID NO: 407200 - DNA, 20 bp, Artificial Sequence
  Description of Artificial Sequence: Synthetic oligonucleotide
  Target: LAMA2; (+) strand; PAM type: YTN; PAM sequence: TTG
ttgagtatctactatgtgac

SEQ ID NO: 407201 - DNA, 20 bp, Artificial Sequence
  Description of Artificial Sequence: Synthetic oligonucleotide
  Target: LAMA2; (+) strand; PAM type: YTN; PAM sequence: TTG
agtatctactatgtgacagg

SEQ ID NO: 407202 - DNA, 20 bp, Artificial Sequence
  Description of Artificial Sequence: Synthetic oligonucleotide
  Target: LAMA2; (+) strand; PAM type: YTN; PAM sequence: CTA
ctatgtgacaggctccatac

SEQ ID NO: 407203 - DNA, 20 bp, Artificial Sequence
  Description of Artificial Sequence: Synthetic oligonucleotide
  Target: LAMA2; (+) strand; PAM type: YTN; PAM sequence: CTA
tgtgacaggctccataccaa

SEQ ID NO: 407204 - DNA, 20 bp, Artificial Sequence
  Description of Artificial Sequence: Synthetic oligonucleotide
  Target: LAMA2; (+) strand; PAM type: YTN; PAM sequence: CTC
cataccaaatactaggaatc

SEQ ID NO: 407205 - DNA, 20 bp, Artificial Sequence
  Description of Artificial Sequence: Synthetic oligonucleotide
  Target: LAMA2; (+) strand; PAM type: YTN; PAM sequence: CTA
ggaatccagtggttgttcaa

SEQ ID NO: 407206 - DNA, 20 bp, Artificial Sequence
  Description of Artificial Sequence: Synthetic oligonucleotide
  Target: LAMA2; (+) strand; PAM type: YTN; PAM sequence: TTG
ttcaaatctaagatttgctt

SEQ ID NO: 407207 - DNA, 20 bp, Artificial Sequence
  Description of Artificial Sequence: Synthetic oligonucleotide
  Target: LAMA2; (+) strand; PAM type: YTN; PAM sequence: TTC
aaatctaagatttgctttac

SEQ ID NO: 407208 - DNA, 20 bp, Artificial Sequence
  Description of Artificial Sequence: Synthetic oligonucleotide
  Target: LAMA2; (+) strand; PAM type: YTN; PAM sequence: CTA
agatttgctttacaagatca

SEQ ID NO: 407209 - DNA, 20 bp, Artificial Sequence
  Description of Artificial Sequence: Synthetic oligonucleotide
  Target: LAMA2; (+) strand; PAM type: YTN; PAM sequence: TTT
gctttacaagatcattaacc

SEQ ID NO: 407210 - DNA, 20 bp, Artificial Sequence
  Description of Artificial Sequence: Synthetic oligonucleotide
  Target: LAMA2; (+) strand; PAM type: YTN; PAM sequence: TTG
ctttacaagatcattaacca

SEQ ID NO: 407211 - DNA, 20 bp, Artificial Sequence
  Description of Artificial Sequence: Synthetic oligonucleotide
  Target: LAMA2; (+) strand; PAM type: YTN; PAM sequence: CTT
tacaagatcattaaccatat

SEQ ID NO: 407212 - DNA, 20 bp, Artificial Sequence
  Description of Artificial Sequence: Synthetic oligonucleotide
  Target: LAMA2; (+) strand; PAM type: YTN; PAM sequence: TTT
acaagatcattaaccatata

SEQ ID NO: 407213 - DNA, 20 bp, Artificial Sequence
  Description of Artificial Sequence: Synthetic oligonucleotide
  Target: LAMA2; (+) strand; PAM type: YTN; PAM sequence: TTA
caagatcattaaccatatat

SEQ ID NO: 407214 - DNA, 20 bp, Artificial Sequence
  Description of Artificial Sequence: Synthetic oligonucleotide
  Target: LAMA2; (+) strand; PAM type: YTN; PAM sequence: TTA
accatatattattgagtgaa

SEQ ID NO: 407215 - DNA, 20 bp, Artificial Sequence
  Description of Artificial Sequence: Synthetic oligonucleotide
  Target: LAMA2; (+) strand; PAM type: YTN; PAM sequence: TTA
ttgagtgaattaaatacagc

SEQ ID NO: 407216 - DNA, 20 bp, Artificial Sequence
  Description of Artificial Sequence: Synthetic oligonucleotide
  Target: LAMA2; (+) strand; PAM type: YTN; PAM sequence: TTG
agtgaattaaatacagccaa

SEQ ID NO: 407217 - DNA, 20 bp, Artificial Sequence
  Description of Artificial Sequence: Synthetic oligonucleotide
  Target: LAMA2; (+) strand; PAM type: YTN; PAM sequence: TTA
aatacagccaaacctaaggt

SEQ ID NO: 407218 - DNA, 20 bp, Artificial Sequence
  Description of Artificial Sequence: Synthetic oligonucleotide
  Target: LAMA2; (+) strand; PAM type: YTN; PAM sequence: CTA
aggttattcaaatctagctt

SEQ ID NO: 407219 - DNA, 20 bp, Artificial Sequence
  Description of Artificial Sequence: Synthetic oligonucleotide
  Target: LAMA2; (+) strand; PAM type: YTN; PAM sequence: TTA
ttcaaatctagcttcattta

SEQ ID NO: 407220 - DNA, 20 bp, Artificial Sequence
  Description of Artificial Sequence: Synthetic oligonucleotide
  Target: LAMA2; (+) strand; PAM type: YTN; PAM sequence: TTC
aaatctagcttcatttattc

SEQ ID NO: 407221 - DNA, 20 bp, Artificial Sequence
  Description of Artificial Sequence: Synthetic oligonucleotide
  Target: LAMA2; (+) strand; PAM type: YTN; PAM sequence: CTA
gcttcatttattctagtgat

SEQ ID NO: 407222 - DNA, 20 bp, Artificial Sequence
  Description of Artificial Sequence: Synthetic oligonucleotide
  Target: LAMA2; (+) strand; PAM type: YTN; PAM sequence: CTT
catttattctagtgatgatt

SEQ ID NO: 407223 - DNA, 20 bp, Artificial Sequence
  Description of Artificial Sequence: Synthetic oligonucleotide
  Target: LAMA2; (+) strand; PAM type: YTN; PAM sequence: TTC
atttattctagtgatgattt

SEQ ID NO: 407224 - DNA, 20 bp, Artificial Sequence
  Description of Artificial Sequence: Synthetic oligonucleotide
  Target: LAMA2; (+) strand; PAM type: YTN; PAM sequence: TTT
attctagtgatgattttaat

SEQ ID NO: 407225 - DNA, 20 bp, Artificial Sequence
  Description of Artificial Sequence: Synthetic oligonucleotide
  Target: LAMA2; (+) strand; PAM type: YTN; PAM sequence: TTA
ttctagtgatgattttaatt

SEQ ID NO: 407226 - DNA, 20 bp, Artificial Sequence
  Description of Artificial Sequence: Synthetic oligonucleotide
  Target: LAMA2; (+) strand; PAM type: YTN; PAM sequence: TTC
tagtgatgattttaattatc

SEQ ID NO: 407227 - DNA, 20 bp, Artificial Sequence
  Description of Artificial Sequence: Synthetic oligonucleotide
  Target: LAMA2; (+) strand; PAM type: YTN; PAM sequence: CTA
gtgatgattttaattatcat

SEQ ID NO: 407228 - DNA, 20 bp, Artificial Sequence
  Description of Artificial Sequence: Synthetic oligonucleotide
  Target: LAMA2; (+) strand; PAM type: YTN; PAM sequence: TTT
taattatcataaaataattt

SEQ ID NO: 407229 - DNA, 20 bp, Artificial Sequence
  Description of Artificial Sequence: Synthetic oligonucleotide
  Target: LAMA2; (+) strand; PAM type: YTN; PAM sequence: TTT
aattatcataaaataatttt

SEQ ID NO: 407230 - DNA, 20 bp, Artificial Sequence
  Description of Artificial Sequence: Synthetic oligonucleotide
  Target: LAMA2; (+) strand; PAM type: YTN; PAM sequence: TTA
attatcataaaataattttt

SEQ ID NO: 407231 - DNA, 20 bp, Artificial Sequence
  Description of Artificial Sequence: Synthetic oligonucleotide
  Target: LAMA2; (+) strand; PAM type: YTN; PAM sequence: TTA
tcataaaataatttttagga

SEQ ID NO: 407232 - DNA, 20 bp, Artificial Sequence
  Description of Artificial Sequence: Synthetic oligonucleotide
  Target: LAMA2; (+) strand; PAM type: YTN; PAM sequence: TTT
ttaggaattatctataaagg

SEQ ID NO: 407233 - DNA, 20 bp, Artificial Sequence
  Description of Artificial Sequence: Synthetic oligonucleotide
  Target: LAMA2; (+) strand; PAM type: YTN; PAM sequence: TTT
taggaattatctataaaggt

SEQ ID NO: 407234 - DNA, 20 bp, Artificial Sequence
  Description of Artificial Sequence: Synthetic oligonucleotide
  Target: LAMA2; (+) strand; PAM type: YTN; PAM sequence: TTT
aggaattatctataaaggtg

SEQ ID NO: 407235 - DNA, 20 bp, Artificial Sequence
  Description of Artificial Sequence: Synthetic oligonucleotide
  Target: LAMA2; (+) strand; PAM type: YTN; PAM sequence: TTA
ggaattatctataaaggtgt

SEQ ID NO: 407236 - DNA, 20 bp, Artificial Sequence
  Description of Artificial Sequence: Synthetic oligonucleotide
  Target: LAMA2; (+) strand; PAM type: YTN; PAM sequence: TTA
tctataaaggtgtgcctgtt

SEQ ID NO: 407237 - DNA, 20 bp, Artificial Sequence
  Description of Artificial Sequence: Synthetic oligonucleotide
  Target: LAMA2; (+) strand; PAM type: YTN; PAM sequence: CTA
taaaggtgtgcctgttaaat

SEQ ID NO: 407238 - DNA, 20 bp, Artificial Sequence
  Description of Artificial Sequence: Synthetic oligonucleotide
  Target: LAMA2; (+) strand; PAM type: YTN; PAM sequence: CTG
ttaaattctataaaatctgt

SEQ ID NO: 407239 - DNA, 20 bp, Artificial Sequence
  Description of Artificial Sequence: Synthetic oligonucleotide
  Target: LAMA2; (+) strand; PAM type: YTN; PAM sequence: TTA
aattctataaaatctgttaa

SEQ ID NO: 407240 - DNA, 20 bp, Artificial Sequence
  Description of Artificial Sequence: Synthetic oligonucleotide
  Target: LAMA2; (+) strand; PAM type: YTN; PAM sequence: TTC
tataaaatctgttaaaatct

SEQ ID NO: 407241 - DNA, 20 bp, Artificial Sequence
  Description of Artificial Sequence: Synthetic oligonucleotide
  Target: LAMA2; (+) strand; PAM type: YTN; PAM sequence: CTA
taaaatctgttaaaatctga

SEQ ID NO: 407242 - DNA, 20 bp, Artificial Sequence
  Description of Artificial Sequence: Synthetic oligonucleotide
  Target: LAMA2; (+) strand; PAM type: YTN; PAM sequence: CTG
ttaaaatctgaatctgttaa

SEQ ID NO: 407243 - DNA, 20 bp, Artificial Sequence
  Description of Artificial Sequence: Synthetic oligonucleotide
  Target: LAMA2; (+) strand; PAM type: YTN; PAM sequence: TTA
aaatctgaatctgttaaatg

SEQ ID NO: 407244 - DNA, 20 bp, Artificial Sequence
  Description of Artificial Sequence: Synthetic oligonucleotide
  Target: LAMA2; (+) strand; PAM type: YTN; PAM sequence: CTG
aatctgttaaatgaatcttt

SEQ ID NO: 407245 - DNA, 20 bp, Artificial Sequence
  Description of Artificial Sequence: Synthetic oligonucleotide
  Target: LAMA2; (+) strand; PAM type: YTN; PAM sequence: CTG
ttaaatgaatctttatcact

SEQ ID NO: 407246 - DNA, 20 bp, Artificial Sequence
  Description of Artificial Sequence: Synthetic oligonucleotide
  Target: LAMA2; (+) strand; PAM type: YTN; PAM sequence: TTA
aatgaatctttatcactaaa

SEQ ID NO: 407247 - DNA, 20 bp, Artificial Sequence
  Description of Artificial Sequence: Synthetic oligonucleotide
  Target: LAMA2; (+) strand; PAM type: YTN; PAM sequence: CTT
tatcactaaaatgtttttac

SEQ ID NO: 407248 - DNA, 20 bp, Artificial Sequence
  Description of Artificial Sequence: Synthetic oligonucleotide
  Target: LAMA2; (+) strand; PAM type: YTN; PAM sequence: TTT
atcactaaaatgtttttact

SEQ ID NO: 407249 - DNA, 20 bp, Artificial Sequence
  Description of Artificial Sequence: Synthetic oligonucleotide
  Target: LAMA2; (+) strand; PAM type: YTN; PAM sequence: TTA
tcactaaaatgtttttactt

SEQ ID NO: 407250 - DNA, 20 bp, Artificial Sequence
  Description of Artificial Sequence: Synthetic oligonucleotide
  Target: LAMA2; (+) strand; PAM type: YTN; PAM sequence: CTA
aaatgtttttactttcatga

SEQ ID NO: 407251 - DNA, 20 bp, Artificial Sequence
  Description of Artificial Sequence: Synthetic oligonucleotide
  Target: LAMA2; (+) strand; PAM type: YTN; PAM sequence: TTT
ttactttcatgatacagcat

SEQ ID NO: 407252 - DNA, 20 bp, Artificial Sequence
  Description of Artificial Sequence: Synthetic oligonucleotide
  Target: LAMA2; (+) strand; PAM type: YTN; PAM sequence: TTT
tactttcatgatacagcatt

SEQ ID NO: 407253 - DNA, 20 bp, Artificial Sequence
  Description of Artificial Sequence: Synthetic oligonucleotide
  Target: LAMA2; (+) strand; PAM type: YTN; PAM sequence: TTT
actttcatgatacagcattg

SEQ ID NO: 407254 - DNA, 20 bp, Artificial Sequence
  Description of Artificial Sequence: Synthetic oligonucleotide
  Target: LAMA2; (+) strand; PAM type: YTN; PAM sequence: TTA
ctttcatgatacagcattgc

SEQ ID NO: 407255 - DNA, 20 bp, Artificial Sequence
  Description of Artificial Sequence: Synthetic oligonucleotide
  Target: LAMA2; (+) strand; PAM type: YTN; PAM sequence: CTT
tcatgatacagcattgcata

SEQ ID NO: 407256 - DNA, 20 bp, Artificial Sequence
  Description of Artificial Sequence: Synthetic oligonucleotide
  Target: LAMA2; (+) strand; PAM type: YTN; PAM sequence: TTT
catgatacagcattgcataa

SEQ ID NO: 407257 - DNA, 20 bp, Artificial Sequence
  Description of Artificial Sequence: Synthetic oligonucleotide
  Target: LAMA2; (+) strand; PAM type: YTN; PAM sequence: TTC
atgatacagcattgcataat

SEQ ID NO: 407258 - DNA, 20 bp, Artificial Sequence
  Description of Artificial Sequence: Synthetic oligonucleotide
  Target: LAMA2; (+) strand; PAM type: YTN; PAM sequence: TTG
cataattacagtatactatt

SEQ ID NO: 407259 - DNA, 20 bp, Artificial Sequence
  Description of Artificial Sequence: Synthetic oligonucleotide
  Target: LAMA2; (+) strand; PAM type: YTN; PAM sequence: TTA
cagtatactatttccatggt

SEQ ID NO: 407260 - DNA, 20 bp, Artificial Sequence
  Description of Artificial Sequence: Synthetic oligonucleotide
  Target: LAMA2; (+) strand; PAM type: YTN; PAM sequence: CTA
tttccatggtgtggcacatt

SEQ ID NO: 407261 - DNA, 20 bp, Artificial Sequence
  Description of Artificial Sequence: Synthetic oligonucleotide
  Target: LAMA2; (+) strand; PAM type: YTN; PAM sequence: TTT
ccatggtgtggcacattatt

SEQ ID NO: 407262 - DNA, 20 bp, Artificial Sequence
  Description of Artificial Sequence: Synthetic oligonucleotide
  Target: LAMA2; (+) strand; PAM type: YTN; PAM sequence: TTC
catggtgtggcacattattt

SEQ ID NO: 407263 - DNA, 20 bp, Artificial Sequence
  Description of Artificial Sequence: Synthetic oligonucleotide
  Target: LAMA2; (+) strand; PAM type: YTN; PAM sequence: TTA
tttcaaaacagccattagag

SEQ ID NO: 407264 - DNA, 20 bp, Artificial Sequence
  Description of Artificial Sequence: Synthetic oligonucleotide
  Target: LAMA2; (+) strand; PAM type: YTN; PAM sequence: TTT
caaaacagccattagaggta

SEQ ID NO: 407265 - DNA, 20 bp, Artificial Sequence
  Description of Artificial Sequence: Synthetic oligonucleotide
  Target: LAMA2; (+) strand; PAM type: YTN; PAM sequence: TTC
aaaacagccattagaggtat

SEQ ID NO: 407266 - DNA, 20 bp, Artificial Sequence
  Description of Artificial Sequence: Synthetic oligonucleotide
  Target: LAMA2; (+) strand; PAM type: YTN; PAM sequence: TTA
gaggtatatttgtgattgat

SEQ ID NO: 407267 - DNA, 20 bp, Artificial Sequence
  Description of Artificial Sequence: Synthetic oligonucleotide
  Target: LAMA2; (+) strand; PAM type: YTN; PAM sequence: TTT
gtgattgataaaggaaccaa

SEQ ID NO: 407268 - DNA, 20 bp, Artificial Sequence
  Description of Artificial Sequence: Synthetic oligonucleotide
  Target: LAMA2; (+) strand; PAM type: YTN; PAM sequence: TTG
tgattgataaaggaaccaaa

SEQ ID NO: 407269 - DNA, 20 bp, Artificial Sequence
  Description of Artificial Sequence: Synthetic oligonucleotide
  Target: LAMA2; (+) strand; PAM type: YTN; PAM sequence: TTG
ataaaggaaccaaacattca

SEQ ID NO: 407270 - DNA, 20 bp, Artificial Sequence
  Description of Artificial Sequence: Synthetic oligonucleotide
  Target: LAMA2; (+) strand; PAM type: YTN; PAM sequence: TTC
atagttacctgttattttgc

SEQ ID NO: 407271 - DNA, 20 bp, Artificial Sequence
  Description of Artificial Sequence: Synthetic oligonucleotide
  Target: LAMA2; (+) strand; PAM type: YTN; PAM sequence: TTA
cctgttattttgcctgcaga

SEQ ID NO: 407272 - DNA, 20 bp, Artificial Sequence
  Description of Artificial Sequence: Synthetic oligonucleotide
  Target: LAMA2; (+) strand; PAM type: YTN; PAM sequence: CTG
ttattttgcctgcagacagg

SEQ ID NO: 407273 - DNA, 20 bp, Artificial Sequence
  Description of Artificial Sequence: Synthetic oligonucleotide
  Target: LAMA2; (+) strand; PAM type: YTN; PAM sequence: TTA
ttttgcctgcagacaggttc

SEQ ID NO: 407274 - DNA, 20 bp, Artificial Sequence
  Description of Artificial Sequence: Synthetic oligonucleotide
  Target: LAMA2; (+) strand; PAM type: YTN; PAM sequence: TTT
tgcctgcagacaggttctca

SEQ ID NO: 407275 - DNA, 20 bp, Artificial Sequence
  Description of Artificial Sequence: Synthetic oligonucleotide
  Target: LAMA2; (+) strand; PAM type: YTN; PAM sequence: TTT
gcctgcagacaggttctcag

SEQ ID NO: 407276 - DNA, 20 bp, Artificial Sequence
  Description of Artificial Sequence: Synthetic oligonucleotide
  Target: LAMA2; (+) strand; PAM type: YTN; PAM sequence: TTG
cctgcagacaggttctcagt

SEQ ID NO: 407277 - DNA, 20 bp, Artificial Sequence
  Description of Artificial Sequence: Synthetic oligonucleotide
  Target: LAMA2; (+) strand; PAM type: YTN; PAM sequence: CTG
cagacaggttctcagtatga

SEQ ID NO: 407278 - DNA, 20 bp, Artificial Sequence
  Description of Artificial Sequence: Synthetic oligonucleotide
  Target: LAMA2; (+) strand; PAM type: YTN; PAM sequence: TTC
tcagtatgacaaagtgcaaa

SEQ ID NO: 407279 - DNA, 20 bp, Artificial Sequence
  Description of Artificial Sequence: Synthetic oligonucleotide
  Target: LAMA2; (+) strand; PAM type: YTN; PAM sequence: CTC
agtatgacaaagtgcaaaag

SEQ ID NO: 407280 - DNA, 20 bp, Artificial Sequence
  Description of Artificial Sequence: Synthetic oligonucleotide
  Target: LAMA2; (+) strand; PAM type: YTN; PAM sequence: TTA
tttttacatgcattgttaag

SEQ ID NO: 407281 - DNA, 20 bp, Artificial Sequence
  Description of Artificial Sequence: Synthetic oligonucleotide
  Target: LAMA2; (+) strand; PAM type: YTN; PAM sequence: TTT
ttacatgcattgttaagctc

SEQ ID NO: 407282 - DNA, 20 bp, Artificial Sequence
  Description of Artificial Sequence: Synthetic oligonucleotide
  Target: LAMA2; (+) strand; PAM type: YTN; PAM sequence: TTT
tacatgcattgttaagctca

SEQ ID NO: 407283 - DNA, 20 bp, Artificial Sequence
  Description of Artificial Sequence: Synthetic oligonucleotide
  Target: LAMA2; (+) strand; PAM type: YTN; PAM sequence: TTT
acatgcattgttaagctcaa

SEQ ID NO: 407284 - DNA, 20 bp, Artificial Sequence
  Description of Artificial Sequence: Synthetic oligonucleotide
  Target: LAMA2; (+) strand; PAM type: YTN; PAM sequence: TTA
catgcattgttaagctcaag

SEQ ID NO: 407285 - DNA, 20 bp, Artificial Sequence
  Description of Artificial Sequence: Synthetic oligonucleotide
  Target: LAMA2; (+) strand; PAM type: YTN; PAM sequence: TTG
ttaagctcaagctgtttgag

SEQ ID NO: 407286 - DNA, 20 bp, Artificial Sequence
  Description of Artificial Sequence: Synthetic oligonucleotide
  Target: LAMA2; (+) strand; PAM type: YTN; PAM sequence: TTA
agctcaagctgtttgagagg

SEQ ID NO: 407287 - DNA, 20 bp, Artificial Sequence
  Description of Artificial Sequence: Synthetic oligonucleotide
  Target: LAMA2; (+) strand; PAM type: YTN; PAM sequence: CTC
aagctgtttgagaggcaata

SEQ ID NO: 407288 - DNA, 20 bp, Artificial Sequence
  Description of Artificial Sequence: Synthetic oligonucleotide
  Target: LAMA2; (+) strand; PAM type: YTN; PAM sequence: CTG
tttgagaggcaatatttata

SEQ ID NO: 407289 - DNA, 20 bp, Artificial Sequence
  Description of Artificial Sequence: Synthetic oligonucleotide
  Target: LAMA2; (+) strand; PAM type: YTN; PAM sequence: TTT
gagaggcaatatttataagc

SEQ ID NO: 407290 - DNA, 20 bp, Artificial Sequence
  Description of Artificial Sequence: Synthetic oligonucleotide
  Target: LAMA2; (+) strand; PAM type: YTN; PAM sequence: TTG
agaggcaatatttataagcc

SEQ ID NO: 407291 - DNA, 20 bp, Artificial Sequence
  Description of Artificial Sequence: Synthetic oligonucleotide
  Target: LAMA2; (+) strand; PAM type: YTN; PAM sequence: TTT
ataagccattcatgaacact

SEQ ID NO: 407292 - DNA, 20 bp, Artificial Sequence
  Description of Artificial Sequence: Synthetic oligonucleotide
  Target: LAMA2; (+) strand; PAM type: YTN; PAM sequence: TTA
taagccattcatgaacacta

SEQ ID NO: 407293 - DNA, 20 bp, Artificial Sequence
  Description of Artificial Sequence: Synthetic oligonucleotide
  Target: LAMA2; (+) strand; PAM type: YTN; PAM sequence: TTC
atgaacactacagaatagtg

SEQ ID NO: 407294 - DNA, 20 bp, Artificial Sequence
  Description of Artificial Sequence: Synthetic oligonucleotide
  Target: LAMA2; (+) strand; PAM type: YTN; PAM sequence: CTA
cagaatagtgacattgtaca

SEQ ID NO: 407295 - DNA, 20 bp, Artificial Sequence
  Description of Artificial Sequence: Synthetic oligonucleotide
  Target: LAMA2; (+) strand; PAM type: YTN; PAM sequence: TTG
tacattttcccatttattag

SEQ ID NO: 407296 - DNA, 20 bp, Artificial Sequence
  Description of Artificial Sequence: Synthetic oligonucleotide
  Target: LAMA2; (+) strand; PAM type: YTN; PAM sequence: TTT
tcccatttattagattgata

SEQ ID NO: 407297 - DNA, 20 bp, Artificial Sequence
  Description of Artificial Sequence: Synthetic oligonucleotide
  Target: LAMA2; (+) strand; PAM type: YTN; PAM sequence: TTT
cccatttattagattgataa

SEQ ID NO: 407298 - DNA, 20 bp, Artificial Sequence
  Description of Artificial Sequence: Synthetic oligonucleotide
  Target: LAMA2; (+) strand; PAM type: YTN; PAM sequence: TTC
ccatttattagattgataag

SEQ ID NO: 407299 - DNA, 20 bp, Artificial Sequence
  Description of Artificial Sequence: Synthetic oligonucleotide
  Target: LAMA2; (+) strand; PAM type: YTN; PAM sequence: TTT
attagattgataagaacaag

SEQ ID NO: 407300 - DNA, 20 bp, Artificial Sequence
  Description of Artificial Sequence: Synthetic oligonucleotide
  Target: LAMA2; (+) strand; PAM type: YTN; PAM sequence: TTA
ttagattgataagaacaagt

SEQ ID NO: 407301 - DNA, 20 bp, Artificial Sequence
  Description of Artificial Sequence: Synthetic oligonucleotide
  Target: LAMA2; (+) strand; PAM type: YTN; PAM sequence: TTA
gattgataagaacaagtact

SEQ ID NO: 407302 - DNA, 20 bp, Artificial Sequence
  Description of Artificial Sequence: Synthetic oligonucleotide
  Target: LAMA2; (+) strand; PAM type: YTN; PAM sequence: TTG
ataagaacaagtactttaaa

SEQ ID NO: 407303 - DNA, 20 bp, Artificial Sequence
  Description of Artificial Sequence: Synthetic oligonucleotide
  Target: LAMA2; (+) strand; PAM type: YTN; PAM sequence: CTT
taaattcatatttcaaagta

SEQ ID NO: 407304 - DNA, 20 bp, Artificial Sequence
  Description of Artificial Sequence: Synthetic oligonucleotide
  Target: LAMA2; (+) strand; PAM type: YTN; PAM sequence: TTT
aaattcatatttcaaagtaa

SEQ ID NO: 407305 - DNA, 20 bp, Artificial Sequence
  Description of Artificial Sequence: Synthetic oligonucleotide
  Target: LAMA2; (+) strand; PAM type: YTN; PAM sequence: TTA
aattcatatttcaaagtaaa

SEQ ID NO: 407306 - DNA, 20 bp, Artificial Sequence
  Description of Artificial Sequence: Synthetic oligonucleotide
  Target: LAMA2; (+) strand; PAM type: YTN; PAM sequence: TTC
atatttcaaagtaaaaattt

SEQ ID NO: 407307 - DNA, 20 bp, Artificial Sequence
  Description of Artificial Sequence: Synthetic oligonucleotide
  Target: LAMA2; (+) strand; PAM type: YTN; PAM sequence: TTT
caaagtaaaaattttccaag

SEQ ID NO: 407308 - DNA, 20 bp, Artificial Sequence
  Description of Artificial Sequence: Synthetic oligonucleotide
  Target: LAMA2; (+) strand; PAM type: YTN; PAM sequence: TTC
aaagtaaaaattttccaagc

SEQ ID NO: 407309 - DNA, 20 bp, Artificial Sequence
  Description of Artificial Sequence: Synthetic oligonucleotide
  Target: LAMA2; (+) strand; PAM type: YTN; PAM sequence: TTT
tccaagctgatattgtgagc

SEQ ID NO: 407310 - DNA, 20 bp, Artificial Sequence
  Description of Artificial Sequence: Synthetic oligonucleotide
  Target: LAMA2; (+) strand; PAM type: YTN; PAM sequence: TTT
ccaagctgatattgtgagct

SEQ ID NO: 407311 - DNA, 20 bp, Artificial Sequence
  Description of Artificial Sequence: Synthetic oligonucleotide
  Target: LAMA2; (+) strand; PAM type: YTN; PAM sequence: TTC
caagctgatattgtgagcta

SEQ ID NO: 407312 - DNA, 20 bp, Artificial Sequence
  Description of Artificial Sequence: Synthetic oligonucleotide
  Target: LAMA2; (+) strand; PAM type: YTN; PAM sequence: CTG
atattgtgagctacggtcat

SEQ ID NO: 407313 - DNA, 20 bp, Artificial Sequence
  Description of Artificial Sequence: Synthetic oligonucleotide
  Target: LAMA2; (+) strand; PAM type: YTN; PAM sequence: TTG
tgagctacggtcatattttg

SEQ ID NO: 407314 - DNA, 20 bp, Artificial Sequence
  Description of Artificial Sequence: Synthetic oligonucleotide
  Target: LAMA2; (+) strand; PAM type: YTN; PAM sequence: CTA
cggtcatattttgattctaa

SEQ ID NO: 407315 - DNA, 20 bp, Artificial Sequence
  Description of Artificial Sequence: Synthetic oligonucleotide
  Target: LAMA2; (+) strand; PAM type: YTN; PAM sequence: TTT
tgattctaatttcactgccg

SEQ ID NO: 407316 - DNA, 20 bp, Artificial Sequence
  Description of Artificial Sequence: Synthetic oligonucleotide
  Target: LAMA2; (+) strand; PAM type: YTN; PAM sequence: TTT
gattctaatttcactgccgt

SEQ ID NO: 407317 - DNA, 20 bp, Artificial Sequence
  Description of Artificial Sequence: Synthetic oligonucleotide
  Target: LAMA2; (+) strand; PAM type: YTN; PAM sequence: TTG
attctaatttcactgccgtc

SEQ ID NO: 407318 - DNA, 20 bp, Artificial Sequence
  Description of Artificial Sequence: Synthetic oligonucleotide
  Target: LAMA2; (+) strand; PAM type: YTN; PAM sequence: TTC
taatttcactgccgtcaagg

SEQ ID NO: 407319 - DNA, 20 bp, Artificial Sequence
  Description of Artificial Sequence: Synthetic oligonucleotide
  Target: LAMA2; (+) strand; PAM type: YTN; PAM sequence: CTA
atttcactgccgtcaagggt

SEQ ID NO: 407320 - DNA, 20 bp, Artificial Sequence
  Description of Artificial Sequence: Synthetic oligonucleotide
  Target: LAMA2; (+) strand; PAM type: YTN; PAM sequence: TTT
cactgccgtcaagggtataa

SEQ ID NO: 407321 - DNA, 20 bp, Artificial Sequence
  Description of Artificial Sequence: Synthetic oligonucleotide
  Target: LAMA2; (+) strand; PAM type: YTN; PAM sequence: TTC
actgccgtcaagggtataag

SEQ ID NO: 407322 - DNA, 20 bp, Artificial Sequence
  Description of Artificial Sequence: Synthetic oligonucleotide
  Target: LAMA2; (+) strand; PAM type: YTN; PAM sequence: CTG
ccgtcaagggtataagtcta

SEQ ID NO: 407323 - DNA, 20 bp, Artificial Sequence
  Description of Artificial Sequence: Synthetic oligonucleotide
  Target: LAMA2; (+) strand; PAM type: YTN; PAM sequence: CTA
tttttagttctattggggct

SEQ ID NO: 407324 - DNA, 20 bp, Artificial Sequence
  Description of Artificial Sequence: Synthetic oligonucleotide
  Target: LAMA2; (+) strand; PAM type: YTN; PAM sequence: TTT
ttagttctattggggctttt

SEQ ID NO: 407325 - DNA, 20 bp, Artificial Sequence
  Description of Artificial Sequence: Synthetic oligonucleotide
  Target: LAMA2; (+) strand; PAM type: YTN; PAM sequence: TTT
tagttctattggggcttttg

SEQ ID NO: 407326 - DNA, 20 bp, Artificial Sequence
  Description of Artificial Sequence: Synthetic oligonucleotide
  Target: LAMA2; (+) strand; PAM type: YTN; PAM sequence: TTT
agttctattggggcttttgc

SEQ ID NO: 407327 - DNA, 20 bp, Artificial Sequence
  Description of Artificial Sequence: Synthetic oligonucleotide
  Target: LAMA2; (+) strand; PAM type: YTN; PAM sequence: TTA
gttctattggggcttttgca

SEQ ID NO: 407328 - DNA, 20 bp, Artificial Sequence
  Description of Artificial Sequence: Synthetic oligonucleotide
  Target: LAMA2; (+) strand; PAM type: YTN; PAM sequence: TTC
tattggggcttttgcatttc

SEQ ID NO: 407329 - DNA, 20 bp, Artificial Sequence
  Description of Artificial Sequence: Synthetic oligonucleotide
  Target: LAMA2; (+) strand; PAM type: YTN; PAM sequence: CTA
ttggggcttttgcatttctt

SEQ ID NO: 407330 - DNA, 20 bp, Artificial Sequence
  Description of Artificial Sequence: Synthetic oligonucleotide
  Target: LAMA2; (+) strand; PAM type: YTN; PAM sequence: TTG
gggcttttgcatttctttcc

SEQ ID NO: 407331 - DNA, 20 bp, Artificial Sequence
  Description of Artificial Sequence: Synthetic oligonucleotide
  Target: LAMA2; (+) strand; PAM type: YTN; PAM sequence: CTT
ttgcatttctttcctttgta

SEQ ID NO: 407332 - DNA, 20 bp, Artificial Sequence
  Description of Artificial Sequence: Synthetic oligonucleotide
  Target: LAMA2; (+) strand; PAM type: YTN; PAM sequence: TTT
tgcatttctttcctttgtag

SEQ ID NO: 407333 - DNA, 20 bp, Artificial Sequence
  Description of Artificial Sequence: Synthetic oligonucleotide
  Target: LAMA2; (+) strand; PAM type: YTN; PAM sequence: TTT
gcatttctttcctttgtaga

SEQ ID NO: 407334 - DNA, 20 bp, Artificial Sequence
  Description of Artificial Sequence: Synthetic oligonucleotide
  Target: LAMA2; (+) strand; PAM type: YTN; PAM sequence: TTG
catttctttcctttgtagat

SEQ ID NO: 407335 - DNA, 20 bp, Artificial Sequence
  Description of Artificial Sequence: Synthetic oligonucleotide
  Target: LAMA2; (+) strand; PAM type: YTN; PAM sequence: TTT
ctttcctttgtagatccctg

SEQ ID NO: 407336 - DNA, 20 bp, Artificial Sequence
  Description of Artificial Sequence: Synthetic oligonucleotide
  Target: LAMA2; (+) strand; PAM type: YTN; PAM sequence: TTC
tttcctttgtagatccctgt

SEQ ID NO: 407337 - DNA, 20 bp, Artificial Sequence
  Description of Artificial Sequence: Synthetic oligonucleotide
  Target: LAMA2; (+) strand; PAM type: YTN; PAM sequence: CTT
tcctttgtagatccctgtga

SEQ ID NO: 407338 - DNA, 20 bp, Artificial Sequence
  Description of Artificial Sequence: Synthetic oligonucleotide
  Target: LAMA2; (+) strand; PAM type: YTN; PAM sequence: TTT
cctttgtagatccctgtgaa

SEQ ID NO: 407339 - DNA, 20 bp, Artificial Sequence
  Description of Artificial Sequence: Synthetic oligonucleotide
  Target: LAMA2; (+) strand; PAM type: YTN; PAM sequence: TTC
ctttgtagatccctgtgaaa

SEQ ID NO: 407340 - DNA, 20 bp, Artificial Sequence
  Description of Artificial Sequence: Synthetic oligonucleotide
  Target: LAMA2; (+) strand; PAM type: YTN; PAM sequence: CTT
tgtagatccctgtgaaatga

SEQ ID NO: 407341 - DNA, 20 bp, Artificial Sequence
  Description of Artificial Sequence: Synthetic oligonucleotide
  Target: LAMA2; (+) strand; PAM type: YTN; PAM sequence: TTT
gtagatccctgtgaaatgat

SEQ ID NO: 407342 - DNA, 20 bp, Artificial Sequence
  Description of Artificial Sequence: Synthetic oligonucleotide
  Target: LAMA2; (+) strand; PAM type: YTN; PAM sequence: TTG
tagatccctgtgaaatgatt

SEQ ID NO: 407343 - DNA, 20 bp, Artificial Sequence
  Description of Artificial Sequence: Synthetic oligonucleotide
  Target: LAMA2; (+) strand; PAM type: YTN; PAM sequence: CTG
tgaaatgattttttaaagat

SEQ ID NO: 407344 - DNA, 20 bp, Artificial Sequence
  Description of Artificial Sequence: Synthetic oligonucleotide
  Target: LAMA2; (+) strand; PAM type: YTN; PAM sequence: TTT
tttaaagatttatgattaaa

SEQ ID NO: 407345 - DNA, 20 bp, Artificial Sequence
  Description of Artificial Sequence: Synthetic oligonucleotide
  Target: LAMA2; (+) strand; PAM type: YTN; PAM sequence: TTT
ttaaagatttatgattaaag

SEQ ID NO: 407346 - DNA, 20 bp, Artificial Sequence
  Description of Artificial Sequence: Synthetic oligonucleotide
  Target: LAMA2; (+) strand; PAM type: YTN; PAM sequence: TTT
taaagatttatgattaaagt

SEQ ID NO: 407347 - DNA, 20 bp, Artificial Sequence
  Description of Artificial Sequence: Synthetic oligonucleotide
  Target: LAMA2; (+) strand; PAM type: YTN; PAM sequence: TTT
aaagatttatgattaaagtt

SEQ ID NO: 407348 - DNA, 20 bp, Artificial Sequence
  Description of Artificial Sequence: Synthetic oligonucleotide
  Target: LAMA2; (+) strand; PAM type: YTN; PAM sequence: TTA
aagatttatgattaaagttt

SEQ ID NO: 407349 - DNA, 20 bp, Artificial Sequence
  Description of Artificial Sequence: Synthetic oligonucleotide
  Target: LAMA2; (+) strand; PAM type: YTN; PAM sequence: TTT
atgattaaagtttattgttt

SEQ ID NO: 407350 - DNA, 20 bp, Artificial Sequence
  Description of Artificial Sequence: Synthetic oligonucleotide
  Target: LAMA2; (+) strand; PAM type: YTN; PAM sequence: TTA
tgattaaagtttattgtttt

SEQ ID NO: 407351 - DNA, 20 bp, Artificial Sequence
  Description of Artificial Sequence: Synthetic oligonucleotide
  Target: LAMA2; (+) strand; PAM type: YTN; PAM sequence: TTA
aagtttattgttttactaaa

SEQ ID NO: 407352 - DNA, 20 bp, Artificial Sequence
  Description of Artificial Sequence: Synthetic oligonucleotide
  Target: LAMA2; (+) strand; PAM type: YTN; PAM sequence: TTT
attgttttactaaatgaaaa

SEQ ID NO: 407353 - DNA, 20 bp, Artificial Sequence
  Description of Artificial Sequence: Synthetic oligonucleotide
  Target: LAMA2; (+) strand; PAM type: YTN; PAM sequence: TTA
ttgttttactaaatgaaaat

SEQ ID NO: 407354 - DNA, 20 bp, Artificial Sequence
  Description of Artificial Sequence: Synthetic oligonucleotide
  Target: LAMA2; (+) strand; PAM type: YTN; PAM sequence: TTG
ttttactaaatgaaaatgta

SEQ ID NO: 407355 - DNA, 20 bp, Artificial Sequence
  Description of Artificial Sequence: Synthetic oligonucleotide
  Target: LAMA2; (+) strand; PAM type: YTN; PAM sequence: TTT
tactaaatgaaaatgtaatt

SEQ ID NO: 407356 - DNA, 20 bp, Artificial Sequence
  Description of Artificial Sequence: Synthetic oligonucleotide
  Target: LAMA2; (+) strand; PAM type: YTN; PAM sequence: TTT
actaaatgaaaatgtaatta

SEQ ID NO: 407357 - DNA, 20 bp, Artificial Sequence
  Description of Artificial Sequence: Synthetic oligonucleotide
  Target: LAMA2; (+) strand; PAM type: YTN; PAM sequence: TTA
ctaaatgaaaatgtaattat

SEQ ID NO: 407358 - DNA, 20 bp, Artificial Sequence
  Description of Artificial Sequence: Synthetic oligonucleotide
  Target: LAMA2; (+) strand; PAM type: YTN; PAM sequence: CTA
aatgaaaatgtaattataag

SEQ ID NO: 407359 - DNA, 20 bp, Artificial Sequence
  Description of Artificial Sequence: Synthetic oligonucleotide
  Target: LAMA2; (+) strand; PAM type: YTN; PAM sequence: TTA
taagtaaattgtttttattt

SEQ ID NO: 407360 - DNA, 20 bp, Artificial Sequence
  Description of Artificial Sequence: Synthetic oligonucleotide
  Target: LAMA2; (+) strand; PAM type: YTN; PAM sequence: TTG
tttttatttttgtttttttt

SEQ ID NO: 407361 - DNA, 20 bp, Artificial Sequence
  Description of Artificial Sequence: Synthetic oligonucleotide
  Target: LAMA2; (+) strand; PAM type: YTN; PAM sequence: TTT
ttatttttgttttttttttc

SEQ ID NO: 407362 - DNA, 20 bp, Artificial Sequence
  Description of Artificial Sequence: Synthetic oligonucleotide
  Target: LAMA2; (+) strand; PAM type: YTN; PAM sequence: TTT
tatttttgttttttttttcc

SEQ ID NO: 407363 - DNA, 20 bp, Artificial Sequence
  Description of Artificial Sequence: Synthetic oligonucleotide
  Target: LAMA2; (+) strand; PAM type: YTN; PAM sequence: TTT
atttttgttttttttttcct

SEQ ID NO: 407364 - DNA, 20 bp, Artificial Sequence
  Description of Artificial Sequence: Synthetic oligonucleotide
  Target: LAMA2; (+) strand; PAM type: YTN; PAM sequence: TTA
tttttgttttttttttcctc

SEQ ID NO: 407365 - DNA, 20 bp, Artificial Sequence
  Description of Artificial Sequence: Synthetic oligonucleotide
  Target: LAMA2; (+) strand; PAM type: YTN; PAM sequence: TTT
ttgttttttttttcctcttt

SEQ ID NO: 407366 - DNA, 20 bp, Artificial Sequence
  Description of Artificial Sequence: Synthetic oligonucleotide
  Target: LAMA2; (+) strand; PAM type: YTN; PAM sequence: TTT
tgttttttttttcctctttc

SEQ ID NO: 407367 - DNA, 20 bp, Artificial Sequence
  Description of Artificial Sequence: Synthetic oligonucleotide
  Target: LAMA2; (+) strand; PAM type: YTN; PAM sequence: TTT
gttttttttttcctctttcc

SEQ ID NO: 407368 - DNA, 20 bp, Artificial Sequence
  Description of Artificial Sequence: Synthetic oligonucleotide
  Target: LAMA2; (+) strand; PAM type: YTN; PAM sequence: TTG
ttttttttttcctctttccc

SEQ ID NO: 407369 - DNA, 20 bp, Artificial Sequence
  Description of Artificial Sequence: Synthetic oligonucleotide
  Target: LAMA2; (+) strand; PAM type: YTN; PAM sequence: TTT
tttttttcctctttcccgtt

SEQ ID NO: 407370 - DNA, 20 bp, Artificial Sequence
  Description of Artificial Sequence: Synthetic oligonucleotide
  Target: LAMA2; (+) strand; PAM type: YTN; PAM sequence: TTT
ttttttcctctttcccgtta

SEQ ID NO: 407371 - DNA, 20 bp, Artificial Sequence
  Description of Artificial Sequence: Synthetic oligonucleotide
  Target: LAMA2; (+) strand; PAM type: YTN; PAM sequence: TTT
tttttcctctttcccgttat

SEQ ID NO: 407372 - DNA, 20 bp, Artificial Sequence
  Description of Artificial Sequence: Synthetic oligonucleotide
  Target: LAMA2; (+) strand; PAM type: YTN; PAM sequence: TTT
ttttcctctttcccgttatc

SEQ ID NO: 407373 - DNA, 20 bp, Artificial Sequence
  Description of Artificial Sequence: Synthetic oligonucleotide
  Target: LAMA2; (+) strand; PAM type: YTN; PAM sequence: TTT
tttcctctttcccgttatct

SEQ ID NO: 407374 - DNA, 20 bp, Artificial Sequence
  Description of Artificial Sequence: Synthetic oligonucleotide
  Target: LAMA2; (+) strand; PAM type: YTN; PAM sequence: TTT
ttcctctttcccgttatcta

SEQ ID NO: 407375 - DNA, 20 bp, Artificial Sequence
  Description of Artificial Sequence: Synthetic oligonucleotide
  Target: LAMA2; (+) strand; PAM type: YTN; PAM sequence: TTT
tcctctttcccgttatctag

SEQ ID NO: 407376 - DNA, 20 bp, Artificial Sequence
  Description of Artificial Sequence: Synthetic oligonucleotide
  Target: LAMA2; (+) strand; PAM type: YTN; PAM sequence: TTT
cctctttcccgttatctagt

SEQ ID NO: 407377 - DNA, 20 bp, Artificial Sequence
  Description of Artificial Sequence: Synthetic oligonucleotide
  Target: LAMA2; (+) strand; PAM type: YTN; PAM sequence: TTC
ctctttcccgttatctagta

SEQ ID NO: 407378 - DNA, 20 bp, Artificial Sequence
  Description of Artificial Sequence: Synthetic oligonucleotide
  Target: LAMA2; (+) strand; PAM type: YTN; PAM sequence: CTC
tttcccgttatctagtatga

SEQ ID NO: 407379 - DNA, 20 bp, Artificial Sequence
  Description of Artificial Sequence: Synthetic oligonucleotide
  Target: LAMA2; (+) strand; PAM type: YTN; PAM sequence: CTT
tcccgttatctagtatgaaa

SEQ ID NO: 407380 - DNA, 20 bp, Artificial Sequence
  Description of Artificial Sequence: Synthetic oligonucleotide
  Target: LAMA2; (+) strand; PAM type: YTN; PAM sequence: TTT
cccgttatctagtatgaaag

SEQ ID NO: 407381 - DNA, 20 bp, Artificial Sequence
  Description of Artificial Sequence: Synthetic oligonucleotide
  Target: LAMA2; (+) strand; PAM type: YTN; PAM sequence: TTC
ccgttatctagtatgaaagc

SEQ ID NO: 407382 - DNA, 20 bp, Artificial Sequence
  Description of Artificial Sequence: Synthetic oligonucleotide
  Target: LAMA2; (+) strand; PAM type: YTN; PAM sequence: TTA
tctagtatgaaagcaaggta

SEQ ID NO: 407383 - DNA, 20 bp, Artificial Sequence
  Description of Artificial Sequence: Synthetic oligonucleotide
  Target: LAMA2; (+) strand; PAM type: YTN; PAM sequence: CTA
gtatgaaagcaaggtaaaat

SEQ ID NO: 407384 - DNA, 20 bp, Artificial Sequence
  Description of Artificial Sequence: Synthetic oligonucleotide
  Target: LAMA2; (+) strand; PAM type: YTN; PAM sequence: TTT
aaatttatgcatgccttctt

SEQ ID NO: 407385 - DNA, 20 bp, Artificial Sequence
  Description of Artificial Sequence: Synthetic oligonucleotide
  Target: LAMA2; (+) strand; PAM type: YTN; PAM sequence: TTA
aatttatgcatgccttcttc

SEQ ID NO: 407386 - DNA, 20 bp, Artificial Sequence
  Description of Artificial Sequence: Synthetic oligonucleotide
  Target: LAMA2; (+) strand; PAM type: YTN; PAM sequence: TTT
atgcatgccttcttcgagtg

SEQ ID NO: 407387 - DNA, 20 bp, Artificial Sequence
  Description of Artificial Sequence: Synthetic oligonucleotide
  Target: LAMA2; (+) strand; PAM type: YTN; PAM sequence: TTA
tgcatgccttcttcgagtgc

SEQ ID NO: 407388 - DNA, 20 bp, Artificial Sequence
  Description of Artificial Sequence: Synthetic oligonucleotide
  Target: LAMA2; (+) strand; PAM type: YTN; PAM sequence: CTT
cttcgagtgcatgggttggg

SEQ ID NO: 407389 - DNA, 20 bp, Artificial Sequence
  Description of Artificial Sequence: Synthetic oligonucleotide
  Target: LAMA2; (+) strand; PAM type: YTN; PAM sequence: TTC
ttcgagtgcatgggttgggt

SEQ ID NO: 407390 - DNA, 20 bp, Artificial Sequence
  Description of Artificial Sequence: Synthetic oligonucleotide
  Target: LAMA2; (+) strand; PAM type: YTN; PAM sequence: CTT
cgagtgcatgggttgggtaa

SEQ ID NO: 407391 - DNA, 20 bp, Artificial Sequence
  Description of Artificial Sequence: Synthetic oligonucleotide
  Target: LAMA2; (+) strand; PAM type: YTN; PAM sequence: TTC
gagtgcatgggttgggtaaa

SEQ ID NO: 407392 - DNA, 20 bp, Artificial Sequence
  Description of Artificial Sequence: Synthetic oligonucleotide
  Target: LAMA2; (+) strand; PAM type: YTN; PAM sequence: TTG
ggtaaatgtggcttcttaga

SEQ ID NO: 407393 - DNA, 20 bp, Artificial Sequence
  Description of Artificial Sequence: Synthetic oligonucleotide
  Target: LAMA2; (+) strand; PAM type: YTN; PAM sequence: CTT
cttagataaagcagccgtgc

SEQ ID NO: 407394 - DNA, 20 bp, Artificial Sequence
  Description of Artificial Sequence: Synthetic oligonucleotide
  Target: LAMA2; (+) strand; PAM type: YTN; PAM sequence: TTC
ttagataaagcagccgtgca

SEQ ID NO: 407395 - DNA, 20 bp, Artificial Sequence
  Description of Artificial Sequence: Synthetic oligonucleotide
  Target: LAMA2; (+) strand; PAM type: YTN; PAM sequence: CTT
agataaagcagccgtgcaga

SEQ ID NO: 407396 - DNA, 20 bp, Artificial Sequence
  Description of Artificial Sequence: Synthetic oligonucleotide
  Target: LAMA2; (+) strand; PAM type: YTN; PAM sequence: TTA
gataaagcagccgtgcagaa

SEQ ID NO: 407397 - DNA, 20 bp, Artificial Sequence
  Description of Artificial Sequence: Synthetic oligonucleotide
  Target: LAMA2; (+) strand; PAM type: YTN; PAM sequence: CTT
tgttcatagtatgtttcacg

SEQ ID NO: 407398 - DNA, 20 bp, Artificial Sequence
  Description of Artificial Sequence: Synthetic oligonucleotide
  Target: LAMA2; (+) strand; PAM type: YTN; PAM sequence: TTT
gttcatagtatgtttcacga

SEQ ID NO: 407399 - DNA, 20 bp, Artificial Sequence
  Description of Artificial Sequence: Synthetic oligonucleotide
  Target: LAMA2; (+) strand; PAM type: YTN; PAM sequence: TTG
ttcatagtatgtttcacgag

SEQ ID NO: 407400 - DNA, 20 bp, Artificial Sequence
  Description of Artificial Sequence: Synthetic oligonucleotide
  Target: LAMA2; (+) strand; PAM type: YTN; PAM sequence: TTC
atagtatgtttcacgagcaa

SEQ ID NO: 407401 - DNA, 20 bp, Artificial Sequence
  Description of Artificial Sequence: Synthetic oligonucleotide
  Target: LAMA2; (+) strand; PAM type: YTN; PAM sequence: TTT
cacgagcaagccgtgcattc

SEQ ID NO: 407402 - DNA, 20 bp, Artificial Sequence
  Description of Artificial Sequence: Synthetic oligonucleotide
  Target: LAMA2; (+) strand; PAM type: YTN; PAM sequence: TTC
acgagcaagccgtgcattct

SEQ ID NO: 407403 - DNA, 20 bp, Artificial Sequence
  Description of Artificial Sequence: Synthetic oligonucleotide
  Target: LAMA2; (+) strand; PAM type: YTN; PAM sequence: TTC
tgtgagagttctcctgctgc

SEQ ID NO: 407404 - DNA, 20 bp, Artificial Sequence
  Description of Artificial Sequence: Synthetic oligonucleotide
  Target: LAMA2; (+) strand; PAM type: YTN; PAM sequence: CTG
tgagagttctcctgctgccc

SEQ ID NO: 407405 - DNA, 20 bp, Artificial Sequence
  Description of Artificial Sequence: Synthetic oligonucleotide
  Target: LAMA2; (+) strand; PAM type: YTN; PAM sequence: TTC
tcctgctgccccttgctggc

SEQ ID NO: 407406 - DNA, 20 bp, Artificial Sequence
  Description of Artificial Sequence: Synthetic oligonucleotide
  Target: LAMA2; (+) strand; PAM type: YTN; PAM sequence: CTC
ctgctgccccttgctggccg

SEQ ID NO: 407407 - DNA, 20 bp, Artificial Sequence
  Description of Artificial Sequence: Synthetic oligonucleotide
  Target: LAMA2; (+) strand; PAM type: YTN; PAM sequence: CTG
ctgccccttgctggccgaca

SEQ ID NO: 407408 - DNA, 20 bp, Artificial Sequence
  Description of Artificial Sequence: Synthetic oligonucleotide
  Target: LAMA2; (+) strand; PAM type: YTN; PAM sequence: CTG
ccccttgctggccgacattc

SEQ ID NO: 407409 - DNA, 20 bp, Artificial Sequence
  Description of Artificial Sequence: Synthetic oligonucleotide
  Target: LAMA2; (+) strand; PAM type: YTN; PAM sequence: CTT
gctggccgacattctgctgc

SEQ ID NO: 407410 - DNA, 20 bp, Artificial Sequence
  Description of Artificial Sequence: Synthetic oligonucleotide
  Target: LAMA2; (+) strand; PAM type: YTN; PAM sequence: TTG
ctggccgacattctgctgct

SEQ ID NO: 407411 - DNA, 20 bp, Artificial Sequence
  Description of Artificial Sequence: Synthetic oligonucleotide
  Target: LAMA2; (+) strand; PAM type: YTN; PAM sequence: CTG
gccgacattctgctgcttac

SEQ ID NO: 407412 - DNA, 20 bp, Artificial Sequence
  Description of Artificial Sequence: Synthetic oligonucleotide
  Target: LAMA2; (+) strand; PAM type: YTN; PAM sequence: TTC
tgctgcttacccaccatcag

SEQ ID NO: 407413 - DNA, 20 bp, Artificial Sequence
  Description of Artificial Sequence: Synthetic oligonucleotide
  Target: LAMA2; (+) strand; PAM type: YTN; PAM sequence: CTG
ctgcttacccaccatcagtt

SEQ ID NO: 407414 - DNA, 20 bp, Artificial Sequence
  Description of Artificial Sequence: Synthetic oligonucleotide
  Target: LAMA2; (+) strand; PAM type: YTN; PAM sequence: CTG
cttacccaccatcagttggg

SEQ ID NO: 407415 - DNA, 20 bp, Artificial Sequence
  Description of Artificial Sequence: Synthetic oligonucleotide
  Target: LAMA2; (+) strand; PAM type: YTN; PAM sequence: CTT
acccaccatcagttgggctg

SEQ ID NO: 407416 - DNA, 20 bp, Artificial Sequence
  Description of Artificial Sequence: Synthetic oligonucleotide
  Target: LAMA2; (+) strand; PAM type: YTN; PAM sequence: TTA
cccaccatcagttgggctgc

SEQ ID NO: 407417 - DNA, 20 bp, Artificial Sequence
  Description of Artificial Sequence: Synthetic oligonucleotide
  Target: LAMA2; (+) strand; PAM type: YTN; PAM sequence: TTG
ggctgcaatttgagttgtct

SEQ ID NO: 407418 - DNA, 20 bp, Artificial Sequence
  Description of Artificial Sequence: Synthetic oligonucleotide
  Target: LAMA2; (+) strand; PAM type: YTN; PAM sequence: CTG
caatttgagttgtctcacca

SEQ ID NO: 407419 - DNA, 20 bp, Artificial Sequence
  Description of Artificial Sequence: Synthetic oligonucleotide
  Target: LAMA2; (+) strand; PAM type: YTN; PAM sequence: TTT
gagttgtctcaccagcagtg

SEQ ID NO: 407420 - DNA, 20 bp, Artificial Sequence
  Description of Artificial Sequence: Synthetic oligonucleotide
  Target: LAMA2; (+) strand; PAM type: YTN; PAM sequence: TTG
agttgtctcaccagcagtga

SEQ ID NO: 407421 - DNA, 20 bp, Artificial Sequence
  Description of Artificial Sequence: Synthetic oligonucleotide
  Target: LAMA2; (+) strand; PAM type: YTN; PAM sequence: TTG
tctcaccagcagtgatgaga

SEQ ID NO: 407422 - DNA, 20 bp, Artificial Sequence
  Description of Artificial Sequence: Synthetic oligonucleotide
  Target: LAMA2; (+) strand; PAM type: YTN; PAM sequence: CTC
accagcagtgatgagatttg

SEQ ID NO: 407423 - DNA, 20 bp, Artificial Sequence
  Description of Artificial Sequence: Synthetic oligonucleotide
  Target: LAMA2; (+) strand; PAM type: YTN; PAM sequence: TTT
gctctgctcacttgttcaac

SEQ ID NO: 407424 - DNA, 20 bp, Artificial Sequence
  Description of Artificial Sequence: Synthetic oligonucleotide
  Target: LAMA2; (+) strand; PAM type: YTN; PAM sequence: TTG
ctctgctcacttgttcaacc

SEQ ID NO: 407425 - DNA, 20 bp, Artificial Sequence
  Description of Artificial Sequence: Synthetic oligonucleotide
  Target: LAMA2; (+) strand; PAM type: YTN; PAM sequence: CTC
tgctcacttgttcaaccatc

SEQ ID NO: 407426 - DNA, 20 bp, Artificial Sequence
  Description of Artificial Sequence: Synthetic oligonucleotide
  Target: LAMA2; (+) strand; PAM type: YTN; PAM sequence: CTG
ctcacttgttcaaccatctg

SEQ ID NO: 407427 - DNA, 20 bp, Artificial Sequence
  Description of Artificial Sequence: Synthetic oligonucleotide
  Target: LAMA2; (+) strand; PAM type: YTN; PAM sequence: CTC
acttgttcaaccatctgcac

SEQ ID NO: 407428 - DNA, 20 bp, Artificial Sequence
  Description of Artificial Sequence: Synthetic oligonucleotide
  Target: LAMA2; (+) strand; PAM type: YTN; PAM sequence: CTT
gttcaaccatctgcacacag

SEQ ID NO: 407429 - DNA, 20 bp, Artificial Sequence
  Description of Artificial Sequence: Synthetic oligonucleotide
  Target: LAMA2; (+) strand; PAM type: YTN; PAM sequence: TTG
ttcaaccatctgcacacagt

SEQ ID NO: 407430 - DNA, 20 bp, Artificial Sequence
  Description of Artificial Sequence: Synthetic oligonucleotide
  Target: LAMA2; (+) strand; PAM type: YTN; PAM sequence: TTC
aaccatctgcacacagtgcc

SEQ ID NO: 407431 - DNA, 20 bp, Artificial Sequence
  Description of Artificial Sequence: Synthetic oligonucleotide
  Target: LAMA2; (+) strand; PAM type: YTN; PAM sequence: CTG
cacacagtgcccctggtgac

SEQ ID NO: 407432 - DNA, 20 bp, Artificial Sequence
  Description of Artificial Sequence: Synthetic oligonucleotide
  Target: LAMA2; (+) strand; PAM type: YTN; PAM sequence: CTG
gtgaccagcagcacacactc

SEQ ID NO: 407433 - DNA, 20 bp, Artificial Sequence
  Description of Artificial Sequence: Synthetic oligonucleotide
  Target: LAMA2; (+) strand; PAM type: YTN; PAM sequence: CTC
aaaaggcagctggtcaattt

SEQ ID NO: 407434 - DNA, 20 bp, Artificial Sequence
  Description of Artificial Sequence: Synthetic oligonucleotide
  Target: LAMA2; (+) strand; PAM type: YTN; PAM sequence: CTG
gtcaatttctggtacacagt

SEQ ID NO: 407435 - DNA, 20 bp, Artificial Sequence
  Description of Artificial Sequence: Synthetic oligonucleotide
  Target: LAMA2; (+) strand; PAM type: YTN; PAM sequence: TTT
ctggtacacagtctagttct

SEQ ID NO: 407436 - DNA, 20 bp, Artificial Sequence
  Description of Artificial Sequence: Synthetic oligonucleotide
  Target: LAMA2; (+) strand; PAM type: YTN; PAM sequence: TTC
tggtacacagtctagttctg

SEQ ID NO: 407437 - DNA, 20 bp, Artificial Sequence
  Description of Artificial Sequence: Synthetic oligonucleotide
  Target: LAMA2; (+) strand; PAM type: YTN; PAM sequence: CTG
gtacacagtctagttctggg

SEQ ID NO: 407438 - DNA, 20 bp, Artificial Sequence
  Description of Artificial Sequence: Synthetic oligonucleotide
  Target: LAMA2; (+) strand; PAM type: YTN; PAM sequence: CTA
gttctgggaaacacggtaaa

SEQ ID NO: 407439 - DNA, 20 bp, Artificial Sequence
  Description of Artificial Sequence: Synthetic oligonucleotide
  Target: LAMA2; (+) strand; PAM type: YTN; PAM sequence: TTC
tgggaaacacggtaaagtgg

SEQ ID NO: 407440 - DNA, 20 bp, Artificial Sequence
  Description of Artificial Sequence: Synthetic oligonucleotide
  Target: LAMA2; (+) strand; PAM type: YTN; PAM sequence: CTG
ggaaacacggtaaagtggtc

SEQ ID NO: 407441 - DNA, 20 bp, Artificial Sequence
  Description of Artificial Sequence: Synthetic oligonucleotide
  Target: LAMA2; (+) strand; PAM type: YTN; PAM sequence: CTC
ttgagttgaaccccgggccc

SEQ ID NO: 407442 - DNA, 20 bp, Artificial Sequence
  Description of Artificial Sequence: Synthetic oligonucleotide
  Target: LAMA2; (+) strand; PAM type: YTN; PAM sequence: CTT
gagttgaaccccgggccctg

SEQ ID NO: 407443 - DNA, 20 bp, Artificial Sequence
  Description of Artificial Sequence: Synthetic oligonucleotide
  Target: LAMA2; (+) strand; PAM type: YTN; PAM sequence: TTG
agttgaaccccgggccctgg

SEQ ID NO: 407444 - DNA, 20 bp, Artificial Sequence
  Description of Artificial Sequence: Synthetic oligonucleotide
  Target: LAMA2; (+) strand; PAM type: YTN; PAM sequence: TTG
aaccccgggccctggcctcc

SEQ ID NO: 407445 - DNA, 20 bp, Artificial Sequence
  Description of Artificial Sequence: Synthetic oligonucleotide
  Target: LAMA2; (+) strand; PAM type: YTN; PAM sequence: CTG
gcctccctagtgccatgctg

SEQ ID NO: 407446 - DNA, 20 bp, Artificial Sequence
  Description of Artificial Sequence: Synthetic oligonucleotide
  Target: LAMA2; (+) strand; PAM type: YTN; PAM sequence: CTC
cctagtgccatgctgtctgc

SEQ ID NO: 407447 - DNA, 20 bp, Artificial Sequence
  Description of Artificial Sequence: Synthetic oligonucleotide
  Target: LAMA2; (+) strand; PAM type: YTN; PAM sequence: CTA
gtgccatgctgtctgctgaa

SEQ ID NO: 407448 - DNA, 20 bp, Artificial Sequence
  Description of Artificial Sequence: Synthetic oligonucleotide
  Target: LAMA2; (+) strand; PAM type: YTN; PAM sequence: CTG
tctgctgaagaatcaaactg

SEQ ID NO: 407449 - DNA, 20 bp, Artificial Sequence
  Description of Artificial Sequence: Synthetic oligonucleotide
  Target: LAMA2; (+) strand; PAM type: YTN; PAM sequence: CTG
ctgaagaatcaaactgtgct

SEQ ID NO: 407450 - DNA, 20 bp, Artificial Sequence
  Description of Artificial Sequence: Synthetic oligonucleotide
  Target: LAMA2; (+) strand; PAM type: YTN; PAM sequence: CTG
aagaatcaaactgtgctctc

SEQ ID NO: 407451 - DNA, 20 bp, Artificial Sequence
  Description of Artificial Sequence: Synthetic oligonucleotide
  Target: LAMA2; (+) strand; PAM type: YTN; PAM sequence: CTG
tgctctcacatgcttaccac

SEQ ID NO: 407452 - DNA, 20 bp, Artificial Sequence
  Description of Artificial Sequence: Synthetic oligonucleotide
  Target: LAMA2; (+) strand; PAM type: YTN; PAM sequence: CTC
tcacatgcttaccactgcct

SEQ ID NO: 407453 - DNA, 20 bp, Artificial Sequence
  Description of Artificial Sequence: Synthetic oligonucleotide
  Target: LAMA2; (+) strand; PAM type: YTN; PAM sequence: CTC
acatgcttaccactgccttc

SEQ ID NO: 407454 - DNA, 20 bp, Artificial Sequence
  Description of Artificial Sequence: Synthetic oligonucleotide
  Target: LAMA2; (+) strand; PAM type: YTN; PAM sequence: CTT
accactgccttcttgctttt

SEQ ID NO: 407455 - DNA, 20 bp, Artificial Sequence
  Description of Artificial Sequence: Synthetic oligonucleotide
  Target: LAMA2; (+) strand; PAM type: YTN; PAM sequence: TTA
ccactgccttcttgcttttt

SEQ ID NO: 407456 - DNA, 20 bp, Artificial Sequence
  Description of Artificial Sequence: Synthetic oligonucleotide
  Target: LAMA2; (+) strand; PAM type: YTN; PAM sequence: CTG
ccttcttgctttttgcaggc

SEQ ID NO: 407457 - DNA, 20 bp, Artificial Sequence
  Description of Artificial Sequence: Synthetic oligonucleotide
  Target: LAMA2; (+) strand; PAM type: YTN; PAM sequence: CTT
cttgctttttgcaggcctgc

SEQ ID NO: 407458 - DNA, 20 bp, Artificial Sequence
  Description of Artificial Sequence: Synthetic oligonucleotide
  Target: LAMA2; (+) strand; PAM type: YTN; PAM sequence: TTC
ttgctttttgcaggcctgca

SEQ ID NO: 407459 - DNA, 20 bp, Artificial Sequence
  Description of Artificial Sequence: Synthetic oligonucleotide
  Target: LAMA2; (+) strand; PAM type: YTN; PAM sequence: CTT
gctttttgcaggcctgcaga

SEQ ID NO: 407460 - DNA, 20 bp, Artificial Sequence
  Description of Artificial Sequence: Synthetic oligonucleotide
  Target: LAMA2; (+) strand; PAM type: YTN; PAM sequence: TTG
ctttttgcaggcctgcagat

SEQ ID NO: 407461 - DNA, 20 bp, Artificial Sequence
  Description of Artificial Sequence: Synthetic oligonucleotide
  Target: LAMA2; (+) strand; PAM type: YTN; PAM sequence: CTT
tttgcaggcctgcagatatg

SEQ ID NO: 407462 - DNA, 20 bp, Artificial Sequence
  Description of Artificial Sequence: Synthetic oligonucleotide
  Target: LAMA2; (+) strand; PAM type: YTN; PAM sequence: TTT
ttgcaggcctgcagatatgc

SEQ ID NO: 407463 - DNA, 20 bp, Artificial Sequence
  Description of Artificial Sequence: Synthetic oligonucleotide
  Target: LAMA2; (+) strand; PAM type: YTN; PAM sequence: TTT
tgcaggcctgcagatatgca

SEQ ID NO: 407464 - DNA, 20 bp, Artificial Sequence
  Description of Artificial Sequence: Synthetic oligonucleotide
  Target: LAMA2; (+) strand; PAM type: YTN; PAM sequence: TTT
gcaggcctgcagatatgcaa

SEQ ID NO: 407465 - DNA, 20 bp, Artificial Sequence
  Description of Artificial Sequence: Synthetic oligonucleotide
  Target: LAMA2; (+) strand; PAM type: YTN; PAM sequence: TTG
caggcctgcagatatgcaaa

SEQ ID NO: 407466 - DNA, 20 bp, Artificial Sequence
  Description of Artificial Sequence: Synthetic oligonucleotide
  Target: LAMA2; (+) strand; PAM type: YTN; PAM sequence: CTG
cagatatgcaaacatttaca

SEQ ID NO: 407467 - DNA, 20 bp, Artificial Sequence
  Description of Artificial Sequence: Synthetic oligonucleotide
  Target: LAMA2; (+) strand; PAM type: YTN; PAM sequence: TTT
acacagcctttgcacctctt

SEQ ID NO: 407468 - DNA, 20 bp, Artificial Sequence
  Description of Artificial Sequence: Synthetic oligonucleotide
  Target: LAMA2; (+) strand; PAM type: YTN; PAM sequence: TTA
cacagcctttgcacctcttg

SEQ ID NO: 407469 - DNA, 20 bp, Artificial Sequence
  Description of Artificial Sequence: Synthetic oligonucleotide
  Target: LAMA2; (+) strand; PAM type: YTN; PAM sequence: CTT
tgcacctcttgtcaaagctg

SEQ ID NO: 407470 - DNA, 20 bp, Artificial Sequence
  Description of Artificial Sequence: Synthetic oligonucleotide
  Target: LAMA2; (+) strand; PAM type: YTN; PAM sequence: TTT
gcacctcttgtcaaagctgt

SEQ ID NO: 407471 - DNA, 20 bp, Artificial Sequence
  Description of Artificial Sequence: Synthetic oligonucleotide
  Target: LAMA2; (+) strand; PAM type: YTN; PAM sequence: TTG
cacctcttgtcaaagctgtt

SEQ ID NO: 407472 - DNA, 20 bp, Artificial Sequence
  Description of Artificial Sequence: Synthetic oligonucleotide
  Target: LAMA2; (+) strand; PAM type: YTN; PAM sequence: CTC
ttgtcaaagctgtttatcta

SEQ ID NO: 407473 - DNA, 20 bp, Artificial Sequence
  Description of Artificial Sequence: Synthetic oligonucleotide
  Target: LAMA2; (+) strand; PAM type: YTN; PAM sequence: CTT
gtcaaagctgtttatctatt

SEQ ID NO: 407474 - DNA, 20 bp, Artificial Sequence
  Description of Artificial Sequence: Synthetic oligonucleotide
  Target: LAMA2; (+) strand; PAM type: YTN; PAM sequence: TTG
tcaaagctgtttatctattg

SEQ ID NO: 407475 - DNA, 20 bp, Artificial Sequence
  Description of Artificial Sequence: Synthetic oligonucleotide
  Target: LAMA2; (+) strand; PAM type: YTN; PAM sequence: CTG
tttatctattgacatgttta

SEQ ID NO: 407476 - DNA, 20 bp, Artificial Sequence
  Description of Artificial Sequence: Synthetic oligonucleotide
  Target: LAMA2; (+) strand; PAM type: YTN; PAM sequence: TTT
atctattgacatgtttattt

SEQ ID NO: 407477 - DNA, 20 bp, Artificial Sequence
  Description of Artificial Sequence: Synthetic oligonucleotide
  Target: LAMA2; (+) strand; PAM type: YTN; PAM sequence: TTA
tctattgacatgtttattta

SEQ ID NO: 407478 - DNA, 20 bp, Artificial Sequence
  Description of Artificial Sequence: Synthetic oligonucleotide
  Target: LAMA2; (+) strand; PAM type: YTN; PAM sequence: CTA
ttgacatgtttatttaaaac

SEQ ID NO: 407479 - DNA, 20 bp, Artificial Sequence
  Description of Artificial Sequence: Synthetic oligonucleotide
  Target: LAMA2; (+) strand; PAM type: YTN; PAM sequence: TTG
acatgtttatttaaaactag

SEQ ID NO: 407480 - DNA, 20 bp, Artificial Sequence
  Description of Artificial Sequence: Synthetic oligonucleotide
  Target: LAMA2; (+) strand; PAM type: YTN; PAM sequence: TTT
atttaaaactagctatggtg

SEQ ID NO: 407481 - DNA, 20 bp, Artificial Sequence
  Description of Artificial Sequence: Synthetic oligonucleotide
  Target: LAMA2; (+) strand; PAM type: YTN; PAM sequence: TTA
tttaaaactagctatggtgc

SEQ ID NO: 407482 - DNA, 20 bp, Artificial Sequence
  Description of Artificial Sequence: Synthetic oligonucleotide
  Target: LAMA2; (+) strand; PAM type: YTN; PAM sequence: TTT
aaaactagctatggtgccag

SEQ ID NO: 407483 - DNA, 20 bp, Artificial Sequence
  Description of Artificial Sequence: Synthetic oligonucleotide
  Target: LAMA2; (+) strand; PAM type: YTN; PAM sequence: TTA
aaactagctatggtgccaga

SEQ ID NO: 407484 - DNA, 20 bp, Artificial Sequence
  Description of Artificial Sequence: Synthetic oligonucleotide
  Target: LAMA2; (+) strand; PAM type: YTN; PAM sequence: CTA
gctatggtgccagatgaagg

SEQ ID NO: 407485 - DNA, 20 bp, Artificial Sequence
  Description of Artificial Sequence: Synthetic oligonucleotide
  Target: LAMA2; (+) strand; PAM type: YTN; PAM sequence: CTA
tggtgccagatgaaggaatc

SEQ ID NO: 407486 - DNA, 20 bp, Artificial Sequence
  Description of Artificial Sequence: Synthetic oligonucleotide
  Target: LAMA2; (+) strand; PAM type: YTN; PAM sequence: CTC
tggaaatactatatttaaaa

SEQ ID NO: 407487 - DNA, 20 bp, Artificial Sequence
  Description of Artificial Sequence: Synthetic oligonucleotide
  Target: LAMA2; (+) strand; PAM type: YTN; PAM sequence: CTG
gaaatactatatttaaaata

SEQ ID NO: 407488 - DNA, 20 bp, Artificial Sequence
  Description of Artificial Sequence: Synthetic oligonucleotide
  Target: LAMA2; (+) strand; PAM type: YTN; PAM sequence: CTA
tatttaaaataagtatttgc

SEQ ID NO: 407489 - DNA, 20 bp, Artificial Sequence
  Description of Artificial Sequence: Synthetic oligonucleotide
  Target: LAMA2; (+) strand; PAM type: YTN; PAM sequence: TTT
aaaataagtatttgcgttaa

SEQ ID NO: 407490 - DNA, 20 bp, Artificial Sequence
  Description of Artificial Sequence: Synthetic oligonucleotide
  Target: LAMA2; (+) strand; PAM type: YTN; PAM sequence: TTA
aaataagtatttgcgttaat

SEQ ID NO: 407491 - DNA, 20 bp, Artificial Sequence
  Description of Artificial Sequence: Synthetic oligonucleotide
  Target: LAMA2; (+) strand; PAM type: YTN; PAM sequence: TTT
gcgttaatagtaaagaagtg

SEQ ID NO: 407492 - DNA, 20 bp, Artificial Sequence
  Description of Artificial Sequence: Synthetic oligonucleotide
  Target: LAMA2; (+) strand; PAM type: YTN; PAM sequence: TTG
cgttaatagtaaagaagtgt

SEQ ID NO: 407493 - DNA, 20 bp, Artificial Sequence
  Description of Artificial Sequence: Synthetic oligonucleotide
  Target: LAMA2; (+) strand; PAM type: YTN; PAM sequence: TTA
atagtaaagaagtgtgagat

SEQ ID NO: 407494 - DNA, 20 bp, Artificial Sequence
  Description of Artificial Sequence: Synthetic oligonucleotide
  Target: LAMA2; (+) strand; PAM type: YTN; PAM sequence: TTC
tcctagcttctcaggagcat

SEQ ID NO: 407495 - DNA, 20 bp, Artificial Sequence
  Description of Artificial Sequence: Synthetic oligonucleotide
  Target: LAMA2; (+) strand; PAM type: YTN; PAM sequence: CTC
ctagcttctcaggagcattt

SEQ ID NO: 407496 - DNA, 20 bp, Artificial Sequence
  Description of Artificial Sequence: Synthetic oligonucleotide
  Target: LAMA2; (+) strand; PAM type: YTN; PAM sequence: CTA
gcttctcaggagcattttaa

SEQ ID NO: 407497 - DNA, 20 bp, Artificial Sequence
  Description of Artificial Sequence: Synthetic oligonucleotide
  Target: LAMA2; (+) strand; PAM type: YTN; PAM sequence: CTT
ctcaggagcattttaattct

SEQ ID NO: 407498 - DNA, 20 bp, Artificial Sequence
  Description of Artificial Sequence: Synthetic oligonucleotide
  Target: LAMA2; (+) strand; PAM type: YTN; PAM sequence: TTC
tcaggagcattttaattctt

SEQ ID NO: 407499 - DNA, 20 bp, Artificial Sequence
  Description of Artificial Sequence: Synthetic oligonucleotide
  Target: LAMA2; (+) strand; PAM type: YTN; PAM sequence: CTC
aggagcattttaattcttac

SEQ ID NO: 407500 - DNA, 20 bp, Artificial Sequence
  Description of Artificial Sequence: Synthetic oligonucleotide
  Target: LAMA2; (+) strand; PAM type: YTN; PAM sequence: TTT
taattcttactagcattagc

SEQ ID NO: 407501 - DNA, 20 bp, Artificial Sequence
  Description of Artificial Sequence: Synthetic oligonucleotide
  Target: LAMA2; (+) strand; PAM type: YTN; PAM sequence: TTT
aattcttactagcattagca

SEQ ID NO: 407502 - DNA, 20 bp, Artificial Sequence
  Description of Artificial Sequence: Synthetic oligonucleotide
  Target: LAMA2; (+) strand; PAM type: YTN; PAM sequence: TTA
attcttactagcattagcat

SEQ ID NO: 407503 - DNA, 20 bp, Artificial Sequence
  Description of Artificial Sequence: Synthetic oligonucleotide
  Target: LAMA2; (+) strand; PAM type: YTN; PAM sequence: TTC
ttactagcattagcataaaa

SEQ ID NO: 407504 - DNA, 20 bp, Artificial Sequence
  Description of Artificial Sequence: Synthetic oligonucleotide
  Target: LAMA2; (+) strand; PAM type: YTN; PAM sequence: CTT
actagcattagcataaaagc

SEQ ID NO: 407505 - DNA, 20 bp, Artificial Sequence
  Description of Artificial Sequence: Synthetic oligonucleotide
  Target: LAMA2; (+) strand; PAM type: YTN; PAM sequence: TTA
ctagcattagcataaaagct

SEQ ID NO: 407506 - DNA, 20 bp, Artificial Sequence
  Description of Artificial Sequence: Synthetic oligonucleotide
  Target: LAMA2; (+) strand; PAM type: YTN; PAM sequence: CTA
gcattagcataaaagctgtg

SEQ ID NO: 407507 - DNA, 20 bp, Artificial Sequence
  Description of Artificial Sequence: Synthetic oligonucleotide
  Target: LAMA2; (+) strand; PAM type: YTN; PAM sequence: TTA
gcataaaagctgtgagcaat

SEQ ID NO: 407508 - DNA, 20 bp, Artificial Sequence
  Description of Artificial Sequence: Synthetic oligonucleotide
  Target: LAMA2; (+) strand; PAM type: YTN; PAM sequence: CTG
tgagcaatgggcctccataa

SEQ ID NO: 407509 - DNA, 20 bp, Artificial Sequence
  Description of Artificial Sequence: Synthetic oligonucleotide
  Target: LAMA2; (+) strand; PAM type: YTN; PAM sequence: CTC
cataaatggctgaacaaacc

SEQ ID NO: 407510 - DNA, 20 bp, Artificial Sequence
  Description of Artificial Sequence: Synthetic oligonucleotide
  Target: LAMA2; (+) strand; PAM type: YTN; PAM sequence: CTG
aacaaacctcagagatgtgc

SEQ ID NO: 407511 - DNA, 20 bp, Artificial Sequence
  Description of Artificial Sequence: Synthetic oligonucleotide
  Target: LAMA2; (+) strand; PAM type: YTN; PAM sequence: CTC
agagatgtgcagggctggta

SEQ ID NO: 407512 - DNA, 20 bp, Artificial Sequence
  Description of Artificial Sequence: Synthetic oligonucleotide
  Target: LAMA2; (+) strand; PAM type: YTN; PAM sequence: CTG
gtatcctctggctagagcta

SEQ ID NO: 407513 - DNA, 20 bp, Artificial Sequence
  Description of Artificial Sequence: Synthetic oligonucleotide
  Target: LAMA2; (+) strand; PAM type: YTN; PAM sequence: CTC
tggctagagctaaaagcctg

SEQ ID NO: 407514 - DNA, 20 bp, Artificial Sequence
  Description of Artificial Sequence: Synthetic oligonucleotide
  Target: LAMA2; (+) strand; PAM type: YTN; PAM sequence: CTG
gctagagctaaaagcctggt

SEQ ID NO: 407515 - DNA, 20 bp, Artificial Sequence
  Description of Artificial Sequence: Synthetic oligonucleotide
  Target: LAMA2; (+) strand; PAM type: YTN; PAM sequence: CTA
gagctaaaagcctggtgttt

SEQ ID NO: 407516 - DNA, 20 bp, Artificial Sequence
  Description of Artificial Sequence: Synthetic oligonucleotide
  Target: LAMA2; (+) strand; PAM type: YTN; PAM sequence: CTA
aaagcctggtgttttggcat

SEQ ID NO: 407517 - DNA, 20 bp, Artificial Sequence
  Description of Artificial Sequence: Synthetic oligonucleotide
  Target: LAMA2; (+) strand; PAM type: YTN; PAM sequence: CTG
gtgttttggcatttcagagc

SEQ ID NO: 407518 - DNA, 20 bp, Artificial Sequence
  Description of Artificial Sequence: Synthetic oligonucleotide
  Target: LAMA2; (+) strand; PAM type: YTN; PAM sequence: TTT
tggcatttcagagcccagct

SEQ ID NO: 407519 - DNA, 20 bp, Artificial Sequence
  Description of Artificial Sequence: Synthetic oligonucleotide
  Target: LAMA2; (+) strand; PAM type: YTN; PAM sequence: TTT
ggcatttcagagcccagctg

SEQ ID NO: 407520 - DNA, 20 bp, Artificial Sequence
  Description of Artificial Sequence: Synthetic oligonucleotide
  Target: LAMA2; (+) strand; PAM type: YTN; PAM sequence: TTG
gcatttcagagcccagctgt

SEQ ID NO: 407521 - DNA, 20 bp, Artificial Sequence
  Description of Artificial Sequence: Synthetic oligonucleotide
  Target: LAMA2; (+) strand; PAM type: YTN; PAM sequence: TTT
cagagcccagctgtgccaga

SEQ ID NO: 407522 - DNA, 20 bp, Artificial Sequence
  Description of Artificial Sequence: Synthetic oligonucleotide
  Target: LAMA2; (+) strand; PAM type: YTN; PAM sequence: TTC
agagcccagctgtgccagat

SEQ ID NO: 407523 - DNA, 20 bp, Artificial Sequence
  Description of Artificial Sequence: Synthetic oligonucleotide
  Target: LAMA2; (+) strand; PAM type: YTN; PAM sequence: CTG
tgccagatttctggaaagaa

SEQ ID NO: 407524 - DNA, 20 bp, Artificial Sequence
  Description of Artificial Sequence: Synthetic oligonucleotide
  Target: LAMA2; (+) strand; PAM type: YTN; PAM sequence: TTT
ctggaaagaagataataaag

SEQ ID NO: 407525 - DNA, 20 bp, Artificial Sequence
  Description of Artificial Sequence: Synthetic oligonucleotide
  Target: LAMA2; (+) strand; PAM type: YTN; PAM sequence: TTC
tggaaagaagataataaagc

SEQ ID NO: 407526 - DNA, 20 bp, Artificial Sequence
  Description of Artificial Sequence: Synthetic oligonucleotide
  Target: LAMA2; (+) strand; PAM type: YTN; PAM sequence: CTG
gaaagaagataataaagccg

SEQ ID NO: 407527 - DNA, 20 bp, Artificial Sequence
  Description of Artificial Sequence: Synthetic oligonucleotide
  Target: LAMA2; (+) strand; PAM type: YTN; PAM sequence: CTG
atccaagaaatttttaaaac

SEQ ID NO: 407528 - DNA, 20 bp, Artificial Sequence
  Description of Artificial Sequence: Synthetic oligonucleotide
  Target: LAMA2; (+) strand; PAM type: YTN; PAM sequence: TTT
ttaaaaccgaggctagattt

SEQ ID NO: 407529 - DNA, 20 bp, Artificial Sequence
  Description of Artificial Sequence: Synthetic oligonucleotide
  Target: LAMA2; (+) strand; PAM type: YTN; PAM sequence: TTT
taaaaccgaggctagatttt

SEQ ID NO: 407530 - DNA, 20 bp, Artificial Sequence
  Description of Artificial Sequence: Synthetic oligonucleotide
  Target: LAMA2; (+) strand; PAM type: YTN; PAM sequence: TTT
aaaaccgaggctagattttt

SEQ ID NO: 407531 - DNA, 20 bp, Artificial Sequence
  Description of Artificial Sequence: Synthetic oligonucleotide
  Target: LAMA2; (+) strand; PAM type: YTN; PAM sequence: TTA
aaaccgaggctagattttta

SEQ ID NO: 407532 - DNA, 20 bp, Artificial Sequence
  Description of Artificial Sequence: Synthetic oligonucleotide
  Target: LAMA2; (+) strand; PAM type: YTN; PAM sequence: CTA
gatttttaataagagaaata

SEQ ID NO: 407533 - DNA, 20 bp, Artificial Sequence
  Description of Artificial Sequence: Synthetic oligonucleotide
  Target: LAMA2; (+) strand; PAM type: YTN; PAM sequence: TTT
ttaataagagaaatagaata

SEQ ID NO: 407534 - DNA, 20 bp, Artificial Sequence
  Description of Artificial Sequence: Synthetic oligonucleotide
  Target: LAMA2; (+) strand; PAM type: YTN; PAM sequence: TTT
taataagagaaatagaatat

SEQ ID NO: 407535 - DNA, 20 bp, Artificial Sequence
  Description of Artificial Sequence: Synthetic oligonucleotide
  Target: LAMA2; (+) strand; PAM type: YTN; PAM sequence: TTT
aataagagaaatagaatata

SEQ ID NO: 407536 - DNA, 20 bp, Artificial Sequence
  Description of Artificial Sequence: Synthetic oligonucleotide
  Target: LAMA2; (+) strand; PAM type: YTN; PAM sequence: TTA
ataagagaaatagaatatac

SEQ ID NO: 407537 - DNA, 20 bp, Artificial Sequence
  Description of Artificial Sequence: Synthetic oligonucleotide
  Target: LAMA2; (+) strand; PAM type: YTN; PAM sequence: TTT
tatcatgatacagttgtaag

SEQ ID NO: 407538 - DNA, 20 bp, Artificial Sequence
  Description of Artificial Sequence: Synthetic oligonucleotide
  Target: LAMA2; (+) strand; PAM type: YTN; PAM sequence: TTT
atcatgatacagttgtaaga

SEQ ID NO: 407539 - DNA, 20 bp, Artificial Sequence
  Description of Artificial Sequence: Synthetic oligonucleotide
  Target: LAMA2; (+) strand; PAM type: YTN; PAM sequence: TTA
tcatgatacagttgtaagac

SEQ ID NO: 407540 - DNA, 20 bp, Artificial Sequence
  Description of Artificial Sequence: Synthetic oligonucleotide
  Target: LAMA2; (+) strand; PAM type: YTN; PAM sequence: TTG
taagaccactagttgtgcta

SEQ ID NO: 407541 - DNA, 20 bp, Artificial Sequence
  Description of Artificial Sequence: Synthetic oligonucleotide
  Target: LAMA2; (+) strand; PAM type: YTN; PAM sequence: CTA
gttgtgctacatttgctgag

SEQ ID NO: 407542 - DNA, 20 bp, Artificial Sequence
  Description of Artificial Sequence: Synthetic oligonucleotide
  Target: LAMA2; (+) strand; PAM type: YTN; PAM sequence: TTG
tgctacatttgctgagatgg

SEQ ID NO: 407543 - DNA, 20 bp, Artificial Sequence
  Description of Artificial Sequence: Synthetic oligonucleotide
  Target: LAMA2; (+) strand; PAM type: YTN; PAM sequence: CTA
catttgctgagatggctaaa

SEQ ID NO: 407544 - DNA, 20 bp, Artificial Sequence
  Description of Artificial Sequence: Synthetic oligonucleotide
  Target: LAMA2; (+) strand; PAM type: YTN; PAM sequence: TTT
gctgagatggctaaaaagcg

SEQ ID NO: 407545 - DNA, 20 bp, Artificial Sequence
  Description of Artificial Sequence: Synthetic oligonucleotide
  Target: LAMA2; (+) strand; PAM type: YTN; PAM sequence: TTG
ctgagatggctaaaaagcga

SEQ ID NO: 407546 - DNA, 20 bp, Artificial Sequence
  Description of Artificial Sequence: Synthetic oligonucleotide
  Target: LAMA2; (+) strand; PAM type: YTN; PAM sequence: CTG
agatggctaaaaagcgaagg

SEQ ID NO: 407547 - DNA, 20 bp, Artificial Sequence
  Description of Artificial Sequence: Synthetic oligonucleotide
  Target: LAMA2; (+) strand; PAM type: YTN; PAM sequence: CTA
aaaagcgaaggctggctttc

SEQ ID NO: 407548 - DNA, 20 bp, Artificial Sequence
  Description of Artificial Sequence: Synthetic oligonucleotide
  Target: LAMA2; (+) strand; PAM type: YTN; PAM sequence: CTG
gctttcatggaaatatatgt

SEQ ID NO: 407549 - DNA, 20 bp, Artificial Sequence
  Description of Artificial Sequence: Synthetic oligonucleotide
  Target: LAMA2; (+) strand; PAM type: YTN; PAM sequence: CTT
tcatggaaatatatgttaat

SEQ ID NO: 407550 - DNA, 20 bp, Artificial Sequence
  Description of Artificial Sequence: Synthetic oligonucleotide
  Target: LAMA2; (+) strand; PAM type: YTN; PAM sequence: TTT
catggaaatatatgttaata

SEQ ID NO: 407551 - DNA, 20 bp, Artificial Sequence
  Description of Artificial Sequence: Synthetic oligonucleotide
  Target: LAMA2; (+) strand; PAM type: YTN; PAM sequence: TTC
atggaaatatatgttaataa

SEQ ID NO: 407552 - DNA, 20 bp, Artificial Sequence
  Description of Artificial Sequence: Synthetic oligonucleotide
  Target: LAMA2; (+) strand; PAM type: YTN; PAM sequence: TTA
ataaaattctgggatggcac

SEQ ID NO: 407553 - DNA, 20 bp, Artificial Sequence
  Description of Artificial Sequence: Synthetic oligonucleotide
  Target: LAMA2; (+) strand; PAM type: YTN; PAM sequence: TTC
tgggatggcactgtgtaggt

SEQ ID NO: 407554 - DNA, 20 bp, Artificial Sequence
  Description of Artificial Sequence: Synthetic oligonucleotide
  Target: LAMA2; (+) strand; PAM type: YTN; PAM sequence: CTG
ggatggcactgtgtaggttt

SEQ ID NO: 407555 - DNA, 20 bp, Artificial Sequence
  Description of Artificial Sequence: Synthetic oligonucleotide
  Target: LAMA2; (+) strand; PAM type: YTN; PAM sequence: CTG
tgtaggtttgtaattttgcc

SEQ ID NO: 407556 - DNA, 20 bp, Artificial Sequence
  Description of Artificial Sequence: Synthetic oligonucleotide
  Target: LAMA2; (+) strand; PAM type: YTN; PAM sequence: TTT
gtaattttgcctttgagtgg

SEQ ID NO: 407557 - DNA, 20 bp, Artificial Sequence
  Description of Artificial Sequence: Synthetic oligonucleotide
  Target: LAMA2; (+) strand; PAM type: YTN; PAM sequence: TTG
taattttgcctttgagtggt

SEQ ID NO: 407558 - DNA, 20 bp, Artificial Sequence
  Description of Artificial Sequence: Synthetic oligonucleotide
  Target: LAMA2; (+) strand; PAM type: YTN; PAM sequence: TTT
tgcctttgagtggtgaccct

SEQ ID NO: 407559 - DNA, 20 bp, Artificial Sequence
  Description of Artificial Sequence: Synthetic oligonucleotide
  Target: LAMA2; (+) strand; PAM type: YTN; PAM sequence: TTT
gcctttgagtggtgaccctc

SEQ ID NO: 407560 - DNA, 20 bp, Artificial Sequence
  Description of Artificial Sequence: Synthetic oligonucleotide
  Target: LAMA2; (+) strand; PAM type: YTN; PAM sequence: TTG
cctttgagtggtgaccctca

SEQ ID NO: 407561 - DNA, 20 bp, Artificial Sequence
  Description of Artificial Sequence: Synthetic oligonucleotide
  Target: LAMA2; (+) strand; PAM type: YTN; PAM sequence: CTT
tgagtggtgaccctcaagaa

SEQ ID NO: 407562 - DNA, 20 bp, Artificial Sequence
  Description of Artificial Sequence: Synthetic oligonucleotide
  Target: LAMA2; (+) strand; PAM type: YTN; PAM sequence: TTT
gagtggtgaccctcaagaaa

SEQ ID NO: 407563 - DNA, 20 bp, Artificial Sequence
  Description of Artificial Sequence: Synthetic oligonucleotide
  Target: LAMA2; (+) strand; PAM type: YTN; PAM sequence: TTG
agtggtgaccctcaagaaac

SEQ ID NO: 407564 - DNA, 20 bp, Artificial Sequence
  Description of Artificial Sequence: Synthetic oligonucleotide
  Target: LAMA2; (+) strand; PAM type: YTN; PAM sequence: CTC
aagaaacagggacccgtggt

SEQ ID NO: 407565 - DNA, 20 bp, Artificial Sequence
  Description of Artificial Sequence: Synthetic oligonucleotide
  Target: LAMA2; (+) strand; PAM type: YTN; PAM sequence: TTA
ccattgagtccagtcacctt

SEQ ID NO: 407566 - DNA, 20 bp, Artificial Sequence
  Description of Artificial Sequence: Synthetic oligonucleotide
  Target: LAMA2; (+) strand; PAM type: YTN; PAM sequence: TTG
agtccagtcaccttatgtga

SEQ ID NO: 407567 - DNA, 20 bp, Artificial Sequence
  Description of Artificial Sequence: Synthetic oligonucleotide
  Target: LAMA2; (+) strand; PAM type: YTN; PAM sequence: CTT
atgtgactatttatcccctg

SEQ ID NO: 407568 - DNA, 20 bp, Artificial Sequence
  Description of Artificial Sequence: Synthetic oligonucleotide
  Target: LAMA2; (+) strand; PAM type: YTN; PAM sequence: TTA
tgtgactatttatcccctgt

SEQ ID NO: 407569 - DNA, 20 bp, Artificial Sequence
  Description of Artificial Sequence: Synthetic oligonucleotide
  Target: LAMA2; (+) strand; PAM type: YTN; PAM sequence: CTA
tttatcccctgtaattgtcc

SEQ ID NO: 407570 - DNA, 20 bp, Artificial Sequence
  Description of Artificial Sequence: Synthetic oligonucleotide
  Target: LAMA2; (+) strand; PAM type: YTN; PAM sequence: TTT
atcccctgtaattgtcctaa

SEQ ID NO: 407571 - DNA, 20 bp, Artificial Sequence
  Description of Artificial Sequence: Synthetic oligonucleotide
  Target: LAMA2; (+) strand; PAM type: YTN; PAM sequence: TTA
tcccctgtaattgtcctaat

SEQ ID NO: 407572 - DNA, 20 bp, Artificial Sequence
  Description of Artificial Sequence: Synthetic oligonucleotide
  Target: LAMA2; (+) strand; PAM type: YTN; PAM sequence: CTG
taattgtcctaatattgagg

SEQ ID NO: 407573 - DNA, 20 bp, Artificial Sequence
  Description of Artificial Sequence: Synthetic oligonucleotide
  Target: LAMA2; (+) strand; PAM type: YTN; PAM sequence: TTG
tcctaatattgaggttgcta

SEQ ID NO: 407574 - DNA, 20 bp, Artificial Sequence
  Description of Artificial Sequence: Synthetic oligonucleotide
  Target: LAMA2; (+) strand; PAM type: YTN; PAM sequence: CTA
atattgaggttgctaaatca

SEQ ID NO: 407575 - DNA, 20 bp, Artificial Sequence
  Description of Artificial Sequence: Synthetic oligonucleotide
  Target: LAMA2; (+) strand; PAM type: YTN; PAM sequence: TTG
aggttgctaaatcatatttt

SEQ ID NO: 407576 - DNA, 20 bp, Artificial Sequence
  Description of Artificial Sequence: Synthetic oligonucleotide
  Target: LAMA2; (+) strand; PAM type: YTN; PAM sequence: TTG
ctaaatcatattttggaatg

SEQ ID NO: 407577 - DNA, 20 bp, Artificial Sequence
  Description of Artificial Sequence: Synthetic oligonucleotide
  Target: LAMA2; (+) strand; PAM type: YTN; PAM sequence: CTA
aatcatattttggaatggtt

SEQ ID NO: 407578 - DNA, 20 bp, Artificial Sequence
  Description of Artificial Sequence: Synthetic oligonucleotide
  Target: LAMA2; (+) strand; PAM type: YTN; PAM sequence: TTT
tggaatggttctttgtgttt

SEQ ID NO: 407579 - DNA, 20 bp, Artificial Sequence
  Description of Artificial Sequence: Synthetic oligonucleotide
  Target: LAMA2; (+) strand; PAM type: YTN; PAM sequence: TTT
ggaatggttctttgtgtttc

SEQ ID NO: 407580 - DNA, 20 bp, Artificial Sequence
  Description of Artificial Sequence: Synthetic oligonucleotide
  Target: LAMA2; (+) strand; PAM type: YTN; PAM sequence: TTG
gaatggttctttgtgtttcc

SEQ ID NO: 407581 - DNA, 20 bp, Artificial Sequence
  Description of Artificial Sequence: Synthetic oligonucleotide
  Target: LAMA2; (+) strand; PAM type: YTN; PAM sequence: TTC
tttgtgtttccatgaaacaa

SEQ ID NO: 407582 - DNA, 20 bp, Artificial Sequence
  Description of Artificial Sequence: Synthetic oligonucleotide
  Target: LAMA2; (+) strand; PAM type: YTN; PAM sequence: CTT
tgtgtttccatgaaacaata

SEQ ID NO: 407583 - DNA, 20 bp, Artificial Sequence
  Description of Artificial Sequence: Synthetic oligonucleotide
  Target: LAMA2; (+) strand; PAM type: YTN; PAM sequence: TTT
gtgtttccatgaaacaataa

SEQ ID NO: 407584 - DNA, 20 bp, Artificial Sequence
  Description of Artificial Sequence: Synthetic oligonucleotide
  Target: LAMA2; (+) strand; PAM type: YTN; PAM sequence: TTG
tgtttccatgaaacaataaa

SEQ ID NO: 407585 - DNA, 20 bp, Artificial Sequence
  Description of Artificial Sequence: Synthetic oligonucleotide
  Target: LAMA2; (+) strand; PAM type: YTN; PAM sequence: TTT
ccatgaaacaataaactata

SEQ ID NO: 407586 - DNA, 20 bp, Artificial Sequence
  Description of Artificial Sequence: Synthetic oligonucleotide
  Target: LAMA2; (+) strand; PAM type: YTN; PAM sequence: TTC
catgaaacaataaactatat

SEQ ID NO: 407587 - DNA, 20 bp, Artificial Sequence
  Description of Artificial Sequence: Synthetic oligonucleotide
  Target: LAMA2; (+) strand; PAM type: YTN; PAM sequence: CTA
tataacttgtaggagtgatt

SEQ ID NO: 407588 - DNA, 20 bp, Artificial Sequence
  Description of Artificial Sequence: Synthetic oligonucleotide
  Target: LAMA2; (+) strand; PAM type: YTN; PAM sequence: CTT
gtaggagtgatttactttag

SEQ ID NO: 407589 - DNA, 20 bp, Artificial Sequence
  Description of Artificial Sequence: Synthetic oligonucleotide
  Target: LAMA2; (+) strand; PAM type: YTN; PAM sequence: TTG
taggagtgatttactttagt

SEQ ID NO: 407590 - DNA, 20 bp, Artificial Sequence
  Description of Artificial Sequence: Synthetic oligonucleotide
  Target: LAMA2; (+) strand; PAM type: YTN; PAM sequence: TTT
actttagtaacaagacctct

SEQ ID NO: 407591 - DNA, 20 bp, Artificial Sequence
  Description of Artificial Sequence: Synthetic oligonucleotide
  Target: LAMA2; (+) strand; PAM type: YTN; PAM sequence: TTA
ctttagtaacaagacctctg

SEQ ID NO: 407592 - DNA, 20 bp, Artificial Sequence
  Description of Artificial Sequence: Synthetic oligonucleotide
  Target: LAMA2; (+) strand; PAM type: YTN; PAM sequence: CTT
tagtaacaagacctctgaaa

SEQ ID NO: 407593 - DNA, 20 bp, Artificial Sequence
  Description of Artificial Sequence: Synthetic oligonucleotide
  Target: LAMA2; (+) strand; PAM type: YTN; PAM sequence: TTT
agtaacaagacctctgaaaa

SEQ ID NO: 407594 - DNA, 20 bp, Artificial Sequence
  Description of Artificial Sequence: Synthetic oligonucleotide
  Target: LAMA2; (+) strand; PAM type: YTN; PAM sequence: TTA
gtaacaagacctctgaaaaa

SEQ ID NO: 407595 - DNA, 20 bp, Artificial Sequence
  Description of Artificial Sequence: Synthetic oligonucleotide
  Target: LAMA2; (+) strand; PAM type: YTN; PAM sequence: CTC
tgaaaaaaatggtgataagt

SEQ ID NO: 407596 - DNA, 20 bp, Artificial Sequence
  Description of Artificial Sequence: Synthetic oligonucleotide
  Target: LAMA2; (+) strand; PAM type: YTN; PAM sequence: CTG
aaaaaaatggtgataagtca

SEQ ID NO: 407597 - DNA, 20 bp, Artificial Sequence
  Description of Artificial Sequence: Synthetic oligonucleotide
  Target: LAMA2; (+) strand; PAM type: YTN; PAM sequence: CTT
tccataaaggaaaatatgga

SEQ ID NO: 407598 - DNA, 20 bp, Artificial Sequence
  Description of Artificial Sequence: Synthetic oligonucleotide
  Target: LAMA2; (+) strand; PAM type: YTN; PAM sequence: TTT
ccataaaggaaaatatggaa

SEQ ID NO: 407599 - DNA, 20 bp, Artificial Sequence
  Description of Artificial Sequence: Synthetic oligonucleotide
  Target: LAMA2; (+) strand; PAM type: YTN; PAM sequence: TTC
cataaaggaaaatatggaag

SEQ ID NO: 407600 - DNA, 20 bp, Artificial Sequence
  Description of Artificial Sequence: Synthetic oligonucleotide
  Target: LAMA2; (+) strand; PAM type: YTN; PAM sequence: CTG
ttaatgaaattcaccttctc

SEQ ID NO: 407601 - DNA, 20 bp, Artificial Sequence
  Description of Artificial Sequence: Synthetic oligonucleotide
  Target: LAMA2; (+) strand; PAM type: YTN; PAM sequence: TTA
atgaaattcaccttctctgt

SEQ ID NO: 407602 - DNA, 20 bp, Artificial Sequence
  Description of Artificial Sequence: Synthetic oligonucleotide
  Target: LAMA2; (+) strand; PAM type: YTN; PAM sequence: TTC
accttctctgtgcattatgc

SEQ ID NO: 407603 - DNA, 20 bp, Artificial Sequence
  Description of Artificial Sequence: Synthetic oligonucleotide
  Target: LAMA2; (+) strand; PAM type: YTN; PAM sequence: CTT
ctctgtgcattatgcaagaa

SEQ ID NO: 407604 - DNA, 20 bp, Artificial Sequence
  Description of Artificial Sequence: Synthetic oligonucleotide
  Target: LAMA2; (+) strand; PAM type: YTN; PAM sequence: TTC
tctgtgcattatgcaagaaa

SEQ ID NO: 407605 - DNA, 20 bp, Artificial Sequence
  Description of Artificial Sequence: Synthetic oligonucleotide
  Target: LAMA2; (+) strand; PAM type: YTN; PAM sequence: CTC
tgtgcattatgcaagaaaaa

SEQ ID NO: 407606 - DNA, 20 bp, Artificial Sequence
  Description of Artificial Sequence: Synthetic oligonucleotide
  Target: LAMA2; (+) strand; PAM type: YTN; PAM sequence: CTG
tgcattatgcaagaaaaata

SEQ ID NO: 407607 - DNA, 20 bp, Artificial Sequence
  Description of Artificial Sequence: Synthetic oligonucleotide
  Target: LAMA2; (+) strand; PAM type: YTN; PAM sequence: TTA
tgcaagaaaaatataagcag

SEQ ID NO: 407608 - DNA, 20 bp, Artificial Sequence
  Description of Artificial Sequence: Synthetic oligonucleotide
  Target: LAMA2; (+) strand; PAM type: YTN; PAM sequence: TTC
tcaccctacagttgggcatg

SEQ ID NO: 407609 - DNA, 20 bp, Artificial Sequence
  Description of Artificial Sequence: Synthetic oligonucleotide
  Target: LAMA2; (+) strand; PAM type: YTN; PAM sequence: CTC
accctacagttgggcatgtt

SEQ ID NO: 407610 - DNA, 20 bp, Artificial Sequence
  Description of Artificial Sequence: Synthetic oligonucleotide
  Target: LAMA2; (+) strand; PAM type: YTN; PAM sequence: CTA
cagttgggcatgttctttat

SEQ ID NO: 407611 - DNA, 20 bp, Artificial Sequence
  Description of Artificial Sequence: Synthetic oligonucleotide
  Target: LAMA2; (+) strand; PAM type: YTN; PAM sequence: TTG
ggcatgttctttataacaac

SEQ ID NO: 407612 - DNA, 20 bp, Artificial Sequence
  Description of Artificial Sequence: Synthetic oligonucleotide
  Target: LAMA2; (+) strand; PAM type: YTN; PAM sequence: TTC
tttataacaaccagctgact

SEQ ID NO: 407613 - DNA, 20 bp, Artificial Sequence
  Description of Artificial Sequence: Synthetic oligonucleotide
  Target: LAMA2; (+) strand; PAM type: YTN; PAM sequence: CTT
tataacaaccagctgactga

SEQ ID NO: 407614 - DNA, 20 bp, Artificial Sequence
  Description of Artificial Sequence: Synthetic oligonucleotide
  Target: LAMA2; (+) strand; PAM type: YTN; PAM sequence: TTT
ataacaaccagctgactgac

SEQ ID NO: 407615 - DNA, 20 bp, Artificial Sequence
  Description of Artificial Sequence: Synthetic oligonucleotide
  Target: LAMA2; (+) strand; PAM type: YTN; PAM sequence: TTA
taacaaccagctgactgact

SEQ ID NO: 407616 - DNA, 20 bp, Artificial Sequence
  Description of Artificial Sequence: Synthetic oligonucleotide
  Target: LAMA2; (+) strand; PAM type: YTN; PAM sequence: CTG
actgactgaacgaaaagaaa

SEQ ID NO: 407617 - DNA, 20 bp, Artificial Sequence
  Description of Artificial Sequence: Synthetic oligonucleotide
  Target: LAMA2; (+) strand; PAM type: YTN; PAM sequence: CTG
actgaacgaaaagaaaacct

SEQ ID NO: 407618 - DNA, 20 bp, Artificial Sequence
  Description of Artificial Sequence: Synthetic oligonucleotide
  Target: LAMA2; (+) strand; PAM type: YTN; PAM sequence: CTG
aacgaaaagaaaaccttggg

SEQ ID NO: 407619 - DNA, 20 bp, Artificial Sequence
  Description of Artificial Sequence: Synthetic oligonucleotide
  Target: LAMA2; (+) strand; PAM type: YTN; PAM sequence: CTT
gggaacaaggaaaaattatc

SEQ ID NO: 407620 - DNA, 20 bp, Artificial Sequence
  Description of Artificial Sequence: Synthetic oligonucleotide
  Target: LAMA2; (+) strand; PAM type: YTN; PAM sequence: TTG
ggaacaaggaaaaattatca

SEQ ID NO: 407621 - DNA, 20 bp, Artificial Sequence
  Description of Artificial Sequence: Synthetic oligonucleotide
  Target: LAMA2; (+) strand; PAM type: YTN; PAM sequence: TTA
tcaatgaaaataaagaagtt

SEQ ID NO: 407622 - DNA, 20 bp, Artificial Sequence
  Description of Artificial Sequence: Synthetic oligonucleotide
  Target: LAMA2; (+) strand; PAM type: YTN; PAM sequence: TTC
cagaaaggagtgcgggggtg

SEQ ID NO: 407623 - DNA, 20 bp, Artificial Sequence
  Description of Artificial Sequence: Synthetic oligonucleotide
  Target: LAMA2; (+) strand; PAM type: YTN; PAM sequence: CTG
acatgaaataaatcacctga

SEQ ID NO: 407624 - DNA, 20 bp, Artificial Sequence
  Description of Artificial Sequence: Synthetic oligonucleotide
  Target: LAMA2; (+) strand; PAM type: YTN; PAM sequence: CTG
atatacactgccaaggtcta

SEQ ID NO: 407625 - DNA, 20 bp, Artificial Sequence
  Description of Artificial Sequence: Synthetic oligonucleotide
  Target: LAMA2; (+) strand; PAM type: YTN; PAM sequence: CTG
ccaaggtctaatttgttttt

SEQ ID NO: 407626 - DNA, 20 bp, Artificial Sequence
  Description of Artificial Sequence: Synthetic oligonucleotide
  Target: LAMA2; (+) strand; PAM type: YTN; PAM sequence: CTA
atttgtttttccacctgttt

SEQ ID NO: 407627 - DNA, 20 bp, Artificial Sequence
  Description of Artificial Sequence: Synthetic oligonucleotide
  Target: LAMA2; (+) strand; PAM type: YTN; PAM sequence: TTT
gtttttccacctgtttttcc

SEQ ID NO: 407628 - DNA, 20 bp, Artificial Sequence
  Description of Artificial Sequence: Synthetic oligonucleotide
  Target: LAMA2; (+) strand; PAM type: YTN; PAM sequence: TTG
tttttccacctgtttttcct

SEQ ID NO: 407629 - DNA, 20 bp, Artificial Sequence
  Description of Artificial Sequence: Synthetic oligonucleotide
  Target: LAMA2; (+) strand; PAM type: YTN; PAM sequence: TTT
ttccacctgtttttcctcat

SEQ ID NO: 407630 - DNA, 20 bp, Artificial Sequence
  Description of Artificial Sequence: Synthetic oligonucleotide
  Target: LAMA2; (+) strand; PAM type: YTN; PAM sequence: TTT
tccacctgtttttcctcatg

SEQ ID NO: 407631 - DNA, 20 bp, Artificial Sequence
  Description of Artificial Sequence: Synthetic oligonucleotide
  Target: LAMA2; (+) strand; PAM type: YTN; PAM sequence: TTT
ccacctgtttttcctcatgc

SEQ ID NO: 407632 - DNA, 20 bp, Artificial Sequence
  Description of Artificial Sequence: Synthetic oligonucleotide
  Target: LAMA2; (+) strand; PAM type: YTN; PAM sequence: TTC
cacctgtttttcctcatgcc

SEQ ID NO: 407633 - DNA, 20 bp, Artificial Sequence
  Description of Artificial Sequence: Synthetic oligonucleotide
  Target: LAMA2; (+) strand; PAM type: YTN; PAM sequence: CTG
tttttcctcatgccatgtgt

SEQ ID NO: 407634 - DNA, 20 bp, Artificial Sequence
  Description of Artificial Sequence: Synthetic oligonucleotide
  Target: LAMA2; (+) strand; PAM type: YTN; PAM sequence: TTT
ttcctcatgccatgtgtttt

SEQ ID NO: 407635 - DNA, 20 bp, Artificial Sequence
  Description of Artificial Sequence: Synthetic oligonucleotide
  Target: LAMA2; (+) strand; PAM type: YTN; PAM sequence: TTT
tcctcatgccatgtgttttt

SEQ ID NO: 407636 - DNA, 20 bp, Artificial Sequence
  Description of Artificial Sequence: Synthetic oligonucleotide
  Target: LAMA2; (+) strand; PAM type: YTN; PAM sequence: TTT
cctcatgccatgtgtttttc

SEQ ID NO: 407637 - DNA, 20 bp, Artificial Sequence
  Description of Artificial Sequence: Synthetic oligonucleotide
  Target: LAMA2; (+) strand; PAM type: YTN; PAM sequence: TTC
ctcatgccatgtgtttttca

SEQ ID NO: 407638 - DNA, 20 bp, Artificial Sequence
  Description of Artificial Sequence: Synthetic oligonucleotide
  Target: LAMA2; (+) strand; PAM type: YTN; PAM sequence: CTC
atgccatgtgtttttcatta

SEQ ID NO: 407639 - DNA, 20 bp, Artificial Sequence
  Description of Artificial Sequence: Synthetic oligonucleotide
  Target: LAMA2; (+) strand; PAM type: YTN; PAM sequence: TTT
ttcattaagataaaaaaagg

SEQ ID NO: 407640 - DNA, 20 bp, Artificial Sequence
  Description of Artificial Sequence: Synthetic oligonucleotide
  Target: LAMA2; (+) strand; PAM type: YTN; PAM sequence: TTT
tcattaagataaaaaaagga

SEQ ID NO: 407641 - DNA, 20 bp, Artificial Sequence
  Description of Artificial Sequence: Synthetic oligonucleotide
  Target: LAMA2; (+) strand; PAM type: YTN; PAM sequence: TTT
cattaagataaaaaaaggaa

SEQ ID NO: 407642 - DNA, 20 bp, Artificial Sequence
  Description of Artificial Sequence: Synthetic oligonucleotide
  Target: LAMA2; (+) strand; PAM type: YTN; PAM sequence: TTC
attaagataaaaaaaggaac

SEQ ID NO: 407643 - DNA, 20 bp, Artificial Sequence
  Description of Artificial Sequence: Synthetic oligonucleotide
  Target: LAMA2; (+) strand; PAM type: YTN; PAM sequence: TTA
agataaaaaaaggaacttgg

SEQ ID NO: 407644 - DNA, 20 bp, Artificial Sequence
  Description of Artificial Sequence: Synthetic oligonucleotide
  Target: LAMA2; (+) strand; PAM type: YTN; PAM sequence: CTT
ggcatcatgggacaatgagg

SEQ ID NO: 407645 - DNA, 20 bp, Artificial Sequence
  Description of Artificial Sequence: Synthetic oligonucleotide
  Target: LAMA2; (+) strand; PAM type: YTN; PAM sequence: TTG
gcatcatgggacaatgagga

SEQ ID NO: 407646 - DNA, 20 bp, Artificial Sequence
  Description of Artificial Sequence: Synthetic oligonucleotide
  Target: LAMA2; (+) strand; PAM type: YTN; PAM sequence: TTA
atcatcaccctatcaactac

SEQ ID NO: 407647 - DNA, 20 bp, Artificial Sequence
  Description of Artificial Sequence: Synthetic oligonucleotide
  Target: LAMA2; (+) strand; PAM type: YTN; PAM sequence: CTA
tcaactacaatatattgatg

SEQ ID NO: 407648 - DNA, 20 bp, Artificial Sequence
  Description of Artificial Sequence: Synthetic oligonucleotide
  Target: LAMA2; (+) strand; PAM type: YTN; PAM sequence: CTA
caatatattgatgccgactg

SEQ ID NO: 407649 - DNA, 20 bp, Artificial Sequence
  Description of Artificial Sequence: Synthetic oligonucleotide
  Target: LAMA2; (+) strand; PAM type: YTN; PAM sequence: TTG
atgccgactggacagttttt

SEQ ID NO: 407650 - DNA, 20 bp, Artificial Sequence
  Description of Artificial Sequence: Synthetic oligonucleotide
  Target: LAMA2; (+) strand; PAM type: YTN; PAM sequence: CTG
gacagtttttaccgatgctg

SEQ ID NO: 407651 - DNA, 20 bp, Artificial Sequence
  Description of Artificial Sequence: Synthetic oligonucleotide
  Target: LAMA2; (+) strand; PAM type: YTN; PAM sequence: TTT
ttaccgatgctgattaccac

SEQ ID NO: 407652 - DNA, 20 bp, Artificial Sequence
  Description of Artificial Sequence: Synthetic oligonucleotide
  Target: LAMA2; (+) strand; PAM type: YTN; PAM sequence: TTT
taccgatgctgattaccacc

SEQ ID NO: 407653 - DNA, 20 bp, Artificial Sequence
  Description of Artificial Sequence: Synthetic oligonucleotide
  Target: LAMA2; (+) strand; PAM type: YTN; PAM sequence: TTT
accgatgctgattaccacca

SEQ ID NO: 407654 - DNA, 20 bp, Artificial Sequence
  Description of Artificial Sequence: Synthetic oligonucleotide
  Target: LAMA2; (+) strand; PAM type: YTN; PAM sequence: TTA
ccgatgctgattaccaccac

SEQ ID NO: 407655 - DNA, 20 bp, Artificial Sequence
  Description of Artificial Sequence: Synthetic oligonucleotide
  Target: LAMA2; (+) strand; PAM type: YTN; PAM sequence: CTG
attaccaccacataaagaat

SEQ ID NO: 407656 - DNA, 20 bp, Artificial Sequence
  Description of Artificial Sequence: Synthetic oligonucleotide
  Target: LAMA2; (+) strand; PAM type: YTN; PAM sequence: TTA
ccaccacataaagaattatc

SEQ ID NO: 407657 - DNA, 20 bp, Artificial Sequence
  Description of Artificial Sequence: Synthetic oligonucleotide
  Target: LAMA2; (+) strand; PAM type: YTN; PAM sequence: TTA
tctttttcacttctatatac

SEQ ID NO: 407658 - DNA, 20 bp, Artificial Sequence
  Description of Artificial Sequence: Synthetic oligonucleotide
  Target: LAMA2; (+) strand; PAM type: YTN; PAM sequence: CTT
tttcacttctatataccttc

SEQ ID NO: 407659 - DNA, 20 bp, Artificial Sequence
  Description of Artificial Sequence: Synthetic oligonucleotide
  Target: LAMA2; (+) strand; PAM type: YTN; PAM sequence: TTT
ttcacttctatataccttca

SEQ ID NO: 407660 - DNA, 20 bp, Artificial Sequence
  Description of Artificial Sequence: Synthetic oligonucleotide
  Target: LAMA2; (+) strand; PAM type: YTN; PAM sequence: TTT
tcacttctatataccttcac

SEQ ID NO: 407661 - DNA, 20 bp, Artificial Sequence
  Description of Artificial Sequence: Synthetic oligonucleotide
  Target: LAMA2; (+) strand; PAM type: YTN; PAM sequence: TTT
cacttctatataccttcact

SEQ ID NO: 407662 - DNA, 20 bp, Artificial Sequence
  Description of Artificial Sequence: Synthetic oligonucleotide
  Target: LAMA2; (+) strand; PAM type: YTN; PAM sequence: TTC
acttctatataccttcacta

SEQ ID NO: 407663 - DNA, 20 bp, Artificial Sequence
  Description of Artificial Sequence: Synthetic oligonucleotide
  Target: LAMA2; (+) strand; PAM type: YTN; PAM sequence: CTT
ctatataccttcactattca

SEQ ID NO: 407664 - DNA, 20 bp, Artificial Sequence
  Description of Artificial Sequence: Synthetic oligonucleotide
  Target: LAMA2; (+) strand; PAM type: YTN; PAM sequence: TTC
tatataccttcactattcaa

SEQ ID NO: 407665 - DNA, 20 bp, Artificial Sequence
  Description of Artificial Sequence: Synthetic oligonucleotide
  Target: LAMA2; (+) strand; PAM type: YTN; PAM sequence: CTA
tataccttcactattcaaaa

SEQ ID NO: 407666 - DNA, 20 bp, Artificial Sequence
  Description of Artificial Sequence: Synthetic oligonucleotide
  Target: LAMA2; (+) strand; PAM type: YTN; PAM sequence: CTT
cactattcaaaatagtagcc

SEQ ID NO: 407667 - DNA, 20 bp, Artificial Sequence
  Description of Artificial Sequence: Synthetic oligonucleotide
  Target: LAMA2; (+) strand; PAM type: YTN; PAM sequence: TTC
actattcaaaatagtagcca

SEQ ID NO: 407668 - DNA, 20 bp, Artificial Sequence
  Description of Artificial Sequence: Synthetic oligonucleotide
  Target: LAMA2; (+) strand; PAM type: YTN; PAM sequence: CTA
ttcaaaatagtagccacaag

SEQ ID NO: 407669 - DNA, 20 bp, Artificial Sequence
  Description of Artificial Sequence: Synthetic oligonucleotide
  Target: LAMA2; (+) strand; PAM type: YTN; PAM sequence: TTC
aaaatagtagccacaagtca

SEQ ID NO: 407670 - DNA, 20 bp, Artificial Sequence
  Description of Artificial Sequence: Synthetic oligonucleotide
  Target: LAMA2; (+) strand; PAM type: YTN; PAM sequence: CTA
tttaattgtaaattaaatca

SEQ ID NO: 407671 - DNA, 20 bp, Artificial Sequence
  Description of Artificial Sequence: Synthetic oligonucleotide
  Target: LAMA2; (+) strand; PAM type: YTN; PAM sequence: TTT
aattgtaaattaaatcaaat

SEQ ID NO: 407672 - DNA, 20 bp, Artificial Sequence
  Description of Artificial Sequence: Synthetic oligonucleotide
  Target: LAMA2; (+) strand; PAM type: YTN; PAM sequence: TTA
attgtaaattaaatcaaatt

SEQ ID NO: 407673 - DNA, 20 bp, Artificial Sequence
  Description of Artificial Sequence: Synthetic oligonucleotide
  Target: LAMA2; (+) strand; PAM type: YTN; PAM sequence: TTG
taaattaaatcaaattaaat

SEQ ID NO: 407674 - DNA, 20 bp, Artificial Sequence
  Description of Artificial Sequence: Synthetic oligonucleotide
  Target: LAMA2; (+) strand; PAM type: YTN; PAM sequence: TTA
aatcaaattaaataacaata

SEQ ID NO: 407675 - DNA, 20 bp, Artificial Sequence
  Description of Artificial Sequence: Synthetic oligonucleotide
  Target: LAMA2; (+) strand; PAM type: YTN; PAM sequence: TTA
aataacaataaatattcagt

SEQ ID NO: 407676 - DNA, 20 bp, Artificial Sequence
  Description of Artificial Sequence: Synthetic oligonucleotide
  Target: LAMA2; (+) strand; PAM type: YTN; PAM sequence: TTC
agtttctcattgagacaagc

SEQ ID NO: 407677 - DNA, 20 bp, Artificial Sequence
  Description of Artificial Sequence: Synthetic oligonucleotide
  Target: LAMA2; (+) strand; PAM type: YTN; PAM sequence: TTT
ctcattgagacaagctacat

SEQ ID NO: 407678 - DNA, 20 bp, Artificial Sequence
  Description of Artificial Sequence: Synthetic oligonucleotide
  Target: LAMA2; (+) strand; PAM type: YTN; PAM sequence: TTC
tcattgagacaagctacatt

SEQ ID NO: 407679 - DNA, 20 bp, Artificial Sequence
  Description of Artificial Sequence: Synthetic oligonucleotide
  Target: LAMA2; (+) strand; PAM type: YTN; PAM sequence: CTC
attgagacaagctacatttc

SEQ ID NO: 407680 - DNA, 20 bp, Artificial Sequence
  Description of Artificial Sequence: Synthetic oligonucleotide
  Target: LAMA2; (+) strand; PAM type: YTN; PAM sequence: TTG
agacaagctacatttcaagt

SEQ ID NO: 407681 - DNA, 20 bp, Artificial Sequence
  Description of Artificial Sequence: Synthetic oligonucleotide
  Target: LAMA2; (+) strand; PAM type: YTN; PAM sequence: CTA
catttcaagtcctaatagcc

SEQ ID NO: 407682 - DNA, 20 bp, Artificial Sequence
  Description of Artificial Sequence: Synthetic oligonucleotide
  Target: LAMA2; (+) strand; PAM type: YTN; PAM sequence: TTT
caagtcctaatagccacatg

SEQ ID NO: 407683 - DNA, 20 bp, Artificial Sequence
  Description of Artificial Sequence: Synthetic oligonucleotide
  Target: LAMA2; (+) strand; PAM type: YTN; PAM sequence: TTC
aagtcctaatagccacatgt

SEQ ID NO: 407684 - DNA, 20 bp, Artificial Sequence
  Description of Artificial Sequence: Synthetic oligonucleotide
  Target: LAMA2; (+) strand; PAM type: YTN; PAM sequence: CTA
atagccacatgtggctagta

SEQ ID NO: 407685 - DNA, 20 bp, Artificial Sequence
  Description of Artificial Sequence: Synthetic oligonucleotide
  Target: LAMA2; (+) strand; PAM type: YTN; PAM sequence: CTA
gtaactactgatttggacag

SEQ ID NO: 407686 - DNA, 20 bp, Artificial Sequence
  Description of Artificial Sequence: Synthetic oligonucleotide
  Target: LAMA2; (+) strand; PAM type: YTN; PAM sequence: CTA
ctgatttggacagtgcagaa

SEQ ID NO: 407687 - DNA, 20 bp, Artificial Sequence
  Description of Artificial Sequence: Synthetic oligonucleotide
  Target: LAMA2; (+) strand; PAM type: YTN; PAM sequence: CTG
atttggacagtgcagaaaac

SEQ ID NO: 407688 - DNA, 20 bp, Artificial Sequence
  Description of Artificial Sequence: Synthetic oligonucleotide
  Target: LAMA2; (+) strand; PAM type: YTN; PAM sequence: TTT
ggacagtgcagaaaacagac

SEQ ID NO: 407689 - DNA, 20 bp, Artificial Sequence
  Description of Artificial Sequence: Synthetic oligonucleotide
  Target: LAMA2; (+) strand; PAM type: YTN; PAM sequence: TTG
gacagtgcagaaaacagaca

SEQ ID NO: 407690 - DNA, 20 bp, Artificial Sequence
  Description of Artificial Sequence: Synthetic oligonucleotide
  Target: LAMA2; (+) strand; PAM type: YTN; PAM sequence: TTC
tgtggaatagcactgttata

SEQ ID NO: 407691 - DNA, 20 bp, Artificial Sequence
  Description of Artificial Sequence: Synthetic oligonucleotide
  Target: LAMA2; (+) strand; PAM type: YTN; PAM sequence: CTG
tggaatagcactgttataat

SEQ ID NO: 407692 - DNA, 20 bp, Artificial Sequence
  Description of Artificial Sequence: Synthetic oligonucleotide
  Target: LAMA2; (+) strand; PAM type: YTN; PAM sequence: CTG
ttataattaaagaagtatca

SEQ ID NO: 407693 - DNA, 20 bp, Artificial Sequence
  Description of Artificial Sequence: Synthetic oligonucleotide
  Target: LAMA2; (+) strand; PAM type: YTN; PAM sequence: TTA
taattaaagaagtatcatca

SEQ ID NO: 407694 - DNA, 20 bp, Artificial Sequence
  Description of Artificial Sequence: Synthetic oligonucleotide
  Target: LAMA2; (+) strand; PAM type: YTN; PAM sequence: TTA
aagaagtatcatcatcactg

SEQ ID NO: 407695 - DNA, 20 bp, Artificial Sequence
  Description of Artificial Sequence: Synthetic oligonucleotide
  Target: LAMA2; (+) strand; PAM type: YTN; PAM sequence: CTG
acattctgatagcctttgtt

SEQ ID NO: 407696 - DNA, 20 bp, Artificial Sequence
  Description of Artificial Sequence: Synthetic oligonucleotide
  Target: LAMA2; (+) strand; PAM type: YTN; PAM sequence: TTC
tgatagcctttgtttgttga

SEQ ID NO: 407697 - DNA, 20 bp, Artificial Sequence
  Description of Artificial Sequence: Synthetic oligonucleotide
  Target: LAMA2; (+) strand; PAM type: YTN; PAM sequence: CTG
atagcctttgtttgttgagc

SEQ ID NO: 407698 - DNA, 20 bp, Artificial Sequence
  Description of Artificial Sequence: Synthetic oligonucleotide
  Target: LAMA2; (+) strand; PAM type: YTN; PAM sequence: CTT
tgtttgttgagcacttactg

SEQ ID NO: 407699 - DNA, 20 bp, Artificial Sequence
  Description of Artificial Sequence: Synthetic oligonucleotide
  Target: LAMA2; (+) strand; PAM type: YTN; PAM sequence: TTT
gtttgttgagcacttactgt

SEQ ID NO: 407700 - DNA, 20 bp, Artificial Sequence
  Description of Artificial Sequence: Synthetic oligonucleotide
  Target: LAMA2; (+) strand; PAM type: YTN; PAM sequence: TTG
tttgttgagcacttactgtg

SEQ ID NO: 407701 - DNA, 20 bp, Artificial Sequence
  Description of Artificial Sequence: Synthetic oligonucleotide
  Target: LAMA2; (+) strand; PAM type: YTN; PAM sequence: TTT
gttgagcacttactgtgtgc

SEQ ID NO: 407702 - DNA, 20 bp, Artificial Sequence
  Description of Artificial Sequence: Synthetic oligonucleotide
  Target: LAMA2; (+) strand; PAM type: YTN; PAM sequence: TTG
ttgagcacttactgtgtgca

SEQ ID NO: 407703 - DNA, 20 bp, Artificial Sequence
  Description of Artificial Sequence: Synthetic oligonucleotide
  Target: LAMA2; (+) strand; PAM type: YTN; PAM sequence: TTG
agcacttactgtgtgcagtg

SEQ ID NO: 407704 - DNA, 20 bp, Artificial Sequence
  Description of Artificial Sequence: Synthetic oligonucleotide
  Target: LAMA2; (+) strand; PAM type: YTN; PAM sequence: CTT
actgtgtgcagtgctattcc

SEQ ID NO: 407705 - DNA, 20 bp, Artificial Sequence
  Description of Artificial Sequence: Synthetic oligonucleotide
  Target: LAMA2; (+) strand; PAM type: YTN; PAM sequence: TTA
ctgtgtgcagtgctattcct

SEQ ID NO: 407706 - DNA, 20 bp, Artificial Sequence
  Description of Artificial Sequence: Synthetic oligonucleotide
  Target: LAMA2; (+) strand; PAM type: YTN; PAM sequence: CTG
tgtgcagtgctattccttaa

SEQ ID NO: 407707 - DNA, 20 bp, Artificial Sequence
  Description of Artificial Sequence: Synthetic oligonucleotide
  Target: LAMA2; (+) strand; PAM type: YTN; PAM sequence: CTA
ttccttaatttattaaacct

SEQ ID NO: 407708 - DNA, 20 bp, Artificial Sequence
  Description of Artificial Sequence: Synthetic oligonucleotide
  Target: LAMA2; (+) strand; PAM type: YTN; PAM sequence: TTC
cttaatttattaaacctttg

SEQ ID NO: 407709 - DNA, 20 bp, Artificial Sequence
  Description of Artificial Sequence: Synthetic oligonucleotide
  Target: LAMA2; (+) strand; PAM type: YTN; PAM sequence: CTT
aatttattaaacctttgcaa

SEQ ID NO: 407710 - DNA, 20 bp, Artificial Sequence
  Description of Artificial Sequence: Synthetic oligonucleotide
  Target: LAMA2; (+) strand; PAM type: YTN; PAM sequence: TTA
atttattaaacctttgcaat

SEQ ID NO: 407711 - DNA, 20 bp, Artificial Sequence
  Description of Artificial Sequence: Synthetic oligonucleotide
  Target: LAMA2; (+) strand; PAM type: YTN; PAM sequence: TTT
attaaacctttgcaatttga

SEQ ID NO: 407712 - DNA, 20 bp, Artificial Sequence
  Description of Artificial Sequence: Synthetic oligonucleotide
  Target: LAMA2; (+) strand; PAM type: YTN; PAM sequence: TTA
ttaaacctttgcaatttgat

SEQ ID NO: 407713 - DNA, 20 bp, Artificial Sequence
  Description of Artificial Sequence: Synthetic oligonucleotide
  Target: LAMA2; (+) strand; PAM type: YTN; PAM sequence: TTA
aacctttgcaatttgattat

SEQ ID NO: 407714 - DNA, 20 bp, Artificial Sequence
  Description of Artificial Sequence: Synthetic oligonucleotide
  Target: LAMA2; (+) strand; PAM type: YTN; PAM sequence: CTT
tgcaatttgattatgtaggt

SEQ ID NO: 407715 - DNA, 20 bp, Artificial Sequence
  Description of Artificial Sequence: Synthetic oligonucleotide
  Target: LAMA2; (+) strand; PAM type: YTN; PAM sequence: TTT
gcaatttgattatgtaggta

SEQ ID NO: 407716 - DNA, 20 bp, Artificial Sequence
  Description of Artificial Sequence: Synthetic oligonucleotide
  Target: LAMA2; (+) strand; PAM type: YTN; PAM sequence: TTG
caatttgattatgtaggtac

SEQ ID NO: 407717 - DNA, 20 bp, Artificial Sequence
  Description of Artificial Sequence: Synthetic oligonucleotide
  Target: LAMA2; (+) strand; PAM type: YTN; PAM sequence: TTT
gattatgtaggtactatgat

SEQ ID NO: 407718 - DNA, 20 bp, Artificial Sequence
  Description of Artificial Sequence: Synthetic oligonucleotide
  Target: LAMA2; (+) strand; PAM type: YTN; PAM sequence: TTG
attatgtaggtactatgatt

SEQ ID NO: 407719 - DNA, 20 bp, Artificial Sequence
  Description of Artificial Sequence: Synthetic oligonucleotide
  Target: LAMA2; (+) strand; PAM type: YTN; PAM sequence: TTA
tgtaggtactatgattatta

SEQ ID NO: 407720 - DNA, 20 bp, Artificial Sequence
  Description of Artificial Sequence: Synthetic oligonucleotide
  Target: LAMA2; (+) strand; PAM type: YTN; PAM sequence: CTA
tgattattattatcatgccc

SEQ ID NO: 407721 - DNA, 20 bp, Artificial Sequence
  Description of Artificial Sequence: Synthetic oligonucleotide
  Target: LAMA2; (+) strand; PAM type: YTN; PAM sequence: TTA
ttattatcatgcccatttca

SEQ ID NO: 407722 - DNA, 20 bp, Artificial Sequence
  Description of Artificial Sequence: Synthetic oligonucleotide
  Target: LAMA2; (+) strand; PAM type: YTN; PAM sequence: TTA
ttatcatgcccatttcacat

SEQ ID NO: 407723 - DNA, 20 bp, Artificial Sequence
  Description of Artificial Sequence: Synthetic oligonucleotide
  Target: LAMA2; (+) strand; PAM type: YTN; PAM sequence: TTA
tcatgcccatttcacatata

SEQ ID NO: 407724 - DNA, 20 bp, Artificial Sequence
  Description of Artificial Sequence: Synthetic oligonucleotide
  Target: LAMA2; (+) strand; PAM type: YTN; PAM sequence: TTT
cacatataagaacactgagt

SEQ ID NO: 407725 - DNA, 20 bp, Artificial Sequence
  Description of Artificial Sequence: Synthetic oligonucleotide
  Target: LAMA2; (+) strand; PAM type: YTN; PAM sequence: TTC
acatataagaacactgagtc

SEQ ID NO: 407726 - DNA, 20 bp, Artificial Sequence
  Description of Artificial Sequence: Synthetic oligonucleotide
  Target: LAMA2; (+) strand; PAM type: YTN; PAM sequence: CTG
agtcttggagaacttagatc

SEQ ID NO: 407727 - DNA, 20 bp, Artificial Sequence
  Description of Artificial Sequence: Synthetic oligonucleotide
  Target: LAMA2; (+) strand; PAM type: YTN; PAM sequence: CTT
ggagaacttagatcacttgc

SEQ ID NO: 407728 - DNA, 20 bp, Artificial Sequence
  Description of Artificial Sequence: Synthetic oligonucleotide
  Target: LAMA2; (+) strand; PAM type: YTN; PAM sequence: TTG
gagaacttagatcacttgca

SEQ ID NO: 407729 - DNA, 20 bp, Artificial Sequence
  Description of Artificial Sequence: Synthetic oligonucleotide
  Target: LAMA2; (+) strand; PAM type: YTN; PAM sequence: CTT
agatcacttgcaacatctgg

SEQ ID NO: 407730 - DNA, 20 bp, Artificial Sequence
  Description of Artificial Sequence: Synthetic oligonucleotide
  Target: LAMA2; (+) strand; PAM type: YTN; PAM sequence: TTA
gatcacttgcaacatctgga

SEQ ID NO: 407731 - DNA, 20 bp, Artificial Sequence
  Description of Artificial Sequence: Synthetic oligonucleotide
  Target: LAMA2; (+) strand; PAM type: YTN; PAM sequence: CTT
gcaacatctggactcaaggg

SEQ ID NO: 407732 - DNA, 20 bp, Artificial Sequence
  Description of Artificial Sequence: Synthetic oligonucleotide
  Target: LAMA2; (+) strand; PAM type: YTN; PAM sequence: TTG
caacatctggactcaagggc

SEQ ID NO: 407733 - DNA, 20 bp, Artificial Sequence
  Description of Artificial Sequence: Synthetic oligonucleotide
  Target: LAMA2; (+) strand; PAM type: YTN; PAM sequence: CTG
gactcaagggcaaggacttc

SEQ ID NO: 407734 - DNA, 20 bp, Artificial Sequence
  Description of Artificial Sequence: Synthetic oligonucleotide
  Target: LAMA2; (+) strand; PAM type: YTN; PAM sequence: CTC
aagggcaaggacttcatttc

SEQ ID NO: 407735 - DNA, 20 bp, Artificial Sequence
  Description of Artificial Sequence: Synthetic oligonucleotide
  Target: LAMA2; (+) strand; PAM type: YTN; PAM sequence: CTT
catttcctaatctgctggca

SEQ ID NO: 407736 - DNA, 20 bp, Artificial Sequence
  Description of Artificial Sequence: Synthetic oligonucleotide
  Target: LAMA2; (+) strand; PAM type: YTN; PAM sequence: TTC
atttcctaatctgctggcac

SEQ ID NO: 407737 - DNA, 20 bp, Artificial Sequence
  Description of Artificial Sequence: Synthetic oligonucleotide
  Target: LAMA2; (+) strand; PAM type: YTN; PAM sequence: TTT
cctaatctgctggcacactt

SEQ ID NO: 407738 - DNA, 20 bp, Artificial Sequence
  Description of Artificial Sequence: Synthetic oligonucleotide
  Target: LAMA2; (+) strand; PAM type: YTN; PAM sequence: TTC
ctaatctgctggcacacttg

SEQ ID NO: 407739 - DNA, 20 bp, Artificial Sequence
  Description of Artificial Sequence: Synthetic oligonucleotide
  Target: LAMA2; (+) strand; PAM type: YTN; PAM sequence: CTA
atctgctggcacacttgccc

SEQ ID NO: 407740 - DNA, 20 bp, Artificial Sequence
  Description of Artificial Sequence: Synthetic oligonucleotide
  Target: LAMA2; (+) strand; PAM type: YTN; PAM sequence: CTG
ctggcacacttgccccattt

SEQ ID NO: 407741 - DNA, 20 bp, Artificial Sequence
  Description of Artificial Sequence: Synthetic oligonucleotide
  Target: LAMA2; (+) strand; PAM type: YTN; PAM sequence: CTG
gcacacttgccccattttat

SEQ ID NO: 407742 - DNA, 20 bp, Artificial Sequence
  Description of Artificial Sequence: Synthetic oligonucleotide
  Target: LAMA2; (+) strand; PAM type: YTN; PAM sequence: CTT
gccccattttatgaagtagt

SEQ ID NO: 407743 - DNA, 20 bp, Artificial Sequence
  Description of Artificial Sequence: Synthetic oligonucleotide
  Target: LAMA2; (+) strand; PAM type: YTN; PAM sequence: TTG
ccccattttatgaagtagta

SEQ ID NO: 407744 - DNA, 20 bp, Artificial Sequence
  Description of Artificial Sequence: Synthetic oligonucleotide
  Target: LAMA2; (+) strand; PAM type: YTN; PAM sequence: TTT
tatgaagtagtatgcaaaag

SEQ ID NO: 407745 - DNA, 20 bp, Artificial Sequence
  Description of Artificial Sequence: Synthetic oligonucleotide
  Target: LAMA2; (+) strand; PAM type: YTN; PAM sequence: TTT
atgaagtagtatgcaaaagt

SEQ ID NO: 407746 - DNA, 20 bp, Artificial Sequence
  Description of Artificial Sequence: Synthetic oligonucleotide
  Target: LAMA2; (+) strand; PAM type: YTN; PAM sequence: TTA
tgaagtagtatgcaaaagta

SEQ ID NO: 407747 - DNA, 20 bp, Artificial Sequence
  Description of Artificial Sequence: Synthetic oligonucleotide
  Target: LAMA2; (+) strand; PAM type: YTN; PAM sequence: TTC
aagtgtagtttgagtataaa

SEQ ID NO: 407748 - DNA, 20 bp, Artificial Sequence
  Description of Artificial Sequence: Synthetic oligonucleotide
  Target: LAMA2; (+) strand; PAM type: YTN; PAM sequence: TTT
gagtataaaagtcatttttc

SEQ ID NO: 407749 - DNA, 20 bp, Artificial Sequence
  Description of Artificial Sequence: Synthetic oligonucleotide
  Target: LAMA2; (+) strand; PAM type: YTN; PAM sequence: TTG
agtataaaagtcatttttca

SEQ ID NO: 407750 - DNA, 20 bp, Artificial Sequence
  Description of Artificial Sequence: Synthetic oligonucleotide
  Target: LAMA2; (+) strand; PAM type: YTN; PAM sequence: TTT
ttcaattttattgaaaaaat

SEQ ID NO: 407751 - DNA, 20 bp, Artificial Sequence
  Description of Artificial Sequence: Synthetic oligonucleotide
  Target: LAMA2; (+) strand; PAM type: YTN; PAM sequence: TTT
tcaattttattgaaaaaata

SEQ ID NO: 407752 - DNA, 20 bp, Artificial Sequence
  Description of Artificial Sequence: Synthetic oligonucleotide
  Target: LAMA2; (+) strand; PAM type: YTN; PAM sequence: TTT
caattttattgaaaaaataa

SEQ ID NO: 407753 - DNA, 20 bp, Artificial Sequence
  Description of Artificial Sequence: Synthetic oligonucleotide
  Target: LAMA2; (+) strand; PAM type: YTN; PAM sequence: TTC
aattttattgaaaaaataaa

SEQ ID NO: 407754 - DNA, 20 bp, Artificial Sequence
  Description of Artificial Sequence: Synthetic oligonucleotide
  Target: LAMA2; (+) strand; PAM type: YTN; PAM sequence: TTT
tattgaaaaaataaaatgta

SEQ ID NO: 407755 - DNA, 20 bp, Artificial Sequence
  Description of Artificial Sequence: Synthetic oligonucleotide
  Target: LAMA2; (+) strand; PAM type: YTN; PAM sequence: TTT
attgaaaaaataaaatgtat

SEQ ID NO: 407756 - DNA, 20 bp, Artificial Sequence
  Description of Artificial Sequence: Synthetic oligonucleotide
  Target: LAMA2; (+) strand; PAM type: YTN; PAM sequence: TTA
ttgaaaaaataaaatgtatg

SEQ ID NO: 407757 - DNA, 20 bp, Artificial Sequence
  Description of Artificial Sequence: Synthetic oligonucleotide
  Target: LAMA2; (+) strand; PAM type: YTN; PAM sequence: TTG
aaaaaataaaatgtatgggt

SEQ ID NO: 407758 - DNA, 20 bp, Artificial Sequence
  Description of Artificial Sequence: Synthetic oligonucleotide
  Target: LAMA2; (+) strand; PAM type: YTN; PAM sequence: TTT
ttgcatttggttgctttatt

SEQ ID NO: 407759 - DNA, 20 bp, Artificial Sequence
  Description of Artificial Sequence: Synthetic oligonucleotide
  Target: LAMA2; (+) strand; PAM type: YTN; PAM sequence: TTT
tgcatttggttgctttattt

SEQ ID NO: 407760 - DNA, 20 bp, Artificial Sequence
  Description of Artificial Sequence: Synthetic oligonucleotide
  Target: LAMA2; (+) strand; PAM type: YTN; PAM sequence: TTT
gcatttggttgctttatttt

SEQ ID NO: 407761 - DNA, 20 bp, Artificial Sequence
  Description of Artificial Sequence: Synthetic oligonucleotide
  Target: LAMA2; (+) strand; PAM type: YTN; PAM sequence: TTG
catttggttgctttattttg

SEQ ID NO: 407762 - DNA, 20 bp, Artificial Sequence
  Description of Artificial Sequence: Synthetic oligonucleotide
  Target: LAMA2; (+) strand; PAM type: YTN; PAM sequence: TTT
ggttgctttattttgttatt

SEQ ID NO: 407763 - DNA, 20 bp, Artificial Sequence
  Description of Artificial Sequence: Synthetic oligonucleotide
  Target: LAMA2; (+) strand; PAM type: YTN; PAM sequence: TTG
gttgctttattttgttattg

SEQ ID NO: 407764 - DNA, 20 bp, Artificial Sequence
  Description of Artificial Sequence: Synthetic oligonucleotide
  Target: LAMA2; (+) strand; PAM type: YTN; PAM sequence: TTG
ctttattttgttattgttct

SEQ ID NO: 407765 - DNA, 20 bp, Artificial Sequence
  Description of Artificial Sequence: Synthetic oligonucleotide
  Target: LAMA2; (+) strand; PAM type: YTN; PAM sequence: CTT
tattttgttattgttctaat

SEQ ID NO: 407766 - DNA, 20 bp, Artificial Sequence
  Description of Artificial Sequence: Synthetic oligonucleotide
  Target: LAMA2; (+) strand; PAM type: YTN; PAM sequence: TTT
attttgttattgttctaatg

SEQ ID NO: 407767 - DNA, 20 bp, Artificial Sequence
  Description of Artificial Sequence: Synthetic oligonucleotide
  Target: LAMA2; (+) strand; PAM type: YTN; PAM sequence: TTA
ttttgttattgttctaatgt

SEQ ID NO: 407768 - DNA, 20 bp, Artificial Sequence
  Description of Artificial Sequence: Synthetic oligonucleotide
  Target: LAMA2; (+) strand; PAM type: YTN; PAM sequence: TTT
tgttattgttctaatgtaga

SEQ ID NO: 407769 - DNA, 20 bp, Artificial Sequence
  Description of Artificial Sequence: Synthetic oligonucleotide
  Target: LAMA2; (+) strand; PAM type: YTN; PAM sequence: TTT
gttattgttctaatgtagaa

SEQ ID NO: 407770 - DNA, 20 bp, Artificial Sequence
  Description of Artificial Sequence: Synthetic oligonucleotide
  Target: LAMA2; (+) strand; PAM type: YTN; PAM sequence: TTG
ttattgttctaatgtagaat

SEQ ID NO: 407771 - DNA, 20 bp, Artificial Sequence
  Description of Artificial Sequence: Synthetic oligonucleotide
  Target: LAMA2; (+) strand; PAM type: YTN; PAM sequence: TTA
ttgttctaatgtagaataca

SEQ ID NO: 407772 - DNA, 20 bp, Artificial Sequence
  Description of Artificial Sequence: Synthetic oligonucleotide
  Target: LAMA2; (+) strand; PAM type: YTN; PAM sequence: TTG
ttctaatgtagaatacagac

SEQ ID NO: 407773 - DNA, 20 bp, Artificial Sequence
  Description of Artificial Sequence: Synthetic oligonucleotide
  Target: LAMA2; (+) strand; PAM type: YTN; PAM sequence: TTC
taatgtagaatacagacttt

SEQ ID NO: 407774 - DNA, 20 bp, Artificial Sequence
  Description of Artificial Sequence: Synthetic oligonucleotide
  Target: LAMA2; (+) strand; PAM type: YTN; PAM sequence: CTA
atgtagaatacagactttgg

SEQ ID NO: 407775 - DNA, 20 bp, Artificial Sequence
  Description of Artificial Sequence: Synthetic oligonucleotide
  Target: LAMA2; (+) strand; PAM type: YTN; PAM sequence: CTT
tggggtcaatctgtaaacta

SEQ ID NO: 407776 - DNA, 20 bp, Artificial Sequence
  Description of Artificial Sequence: Synthetic oligonucleotide
  Target: LAMA2; (+) strand; PAM type: YTN; PAM sequence: TTT
ggggtcaatctgtaaactaa

SEQ ID NO: 407777 - DNA, 20 bp, Artificial Sequence
  Description of Artificial Sequence: Synthetic oligonucleotide
  Target: LAMA2; (+) strand; PAM type: YTN; PAM sequence: TTG
gggtcaatctgtaaactaaa

SEQ ID NO: 407778 - DNA, 20 bp, Artificial Sequence
  Description of Artificial Sequence: Synthetic oligonucleotide
  Target: LAMA2; (+) strand; PAM type: YTN; PAM sequence: CTG
taaactaaattaatctgtta

SEQ ID NO: 407779 - DNA, 20 bp, Artificial Sequence
  Description of Artificial Sequence: Synthetic oligonucleotide
  Target: LAMA2; (+) strand; PAM type: YTN; PAM sequence: CTA
aattaatctgttaaaaaaaa

SEQ ID NO: 407780 - DNA, 20 bp, Artificial Sequence
  Description of Artificial Sequence: Synthetic oligonucleotide
  Target: LAMA2; (+) strand; PAM type: YTN; PAM sequence: TTA
atctgttaaaaaaaaacatt

SEQ ID NO: 407781 - DNA, 20 bp, Artificial Sequence
  Description of Artificial Sequence: Synthetic oligonucleotide
  Target: LAMA2; (+) strand; PAM type: YTN; PAM sequence: CTG
ttaaaaaaaaacattttttt

SEQ ID NO: 407782 - DNA, 20 bp, Artificial Sequence
  Description of Artificial Sequence: Synthetic oligonucleotide
  Target: LAMA2; (+) strand; PAM type: YTN; PAM sequence: TTA
aaaaaaaacatttttttatt

SEQ ID NO: 407783 - DNA, 20 bp, Artificial Sequence
  Description of Artificial Sequence: Synthetic oligonucleotide
  Target: LAMA2; (+) strand; PAM type: YTN; PAM sequence: TTT
ttttattttgagacagggat

SEQ ID NO: 407784 - DNA, 20 bp, Artificial Sequence
  Description of Artificial Sequence: Synthetic oligonucleotide
  Target: LAMA2; (+) strand; PAM type: YTN; PAM sequence: TTT
tttattttgagacagggatc

SEQ ID NO: 407785 - DNA, 20 bp, Artificial Sequence
  Description of Artificial Sequence: Synthetic oligonucleotide
  Target: LAMA2; (+) strand; PAM type: YTN; PAM sequence: TTT
ttattttgagacagggatct

SEQ ID NO: 407786 - DNA, 20 bp, Artificial Sequence
  Description of Artificial Sequence: Synthetic oligonucleotide
  Target: LAMA2; (+) strand; PAM type: YTN; PAM sequence: TTT
tattttgagacagggatctc

SEQ ID NO: 407787 - DNA, 20 bp, Artificial Sequence
  Description of Artificial Sequence: Synthetic oligonucleotide
  Target: LAMA2; (+) strand; PAM type: YTN; PAM sequence: TTT
attttgagacagggatctca

SEQ ID NO: 407788 - DNA, 20 bp, Artificial Sequence
  Description of Artificial Sequence: Synthetic oligonucleotide
  Target: LAMA2; (+) strand; PAM type: YTN; PAM sequence: TTA
ttttgagacagggatctcac

SEQ ID NO: 407789 - DNA, 20 bp, Artificial Sequence
  Description of Artificial Sequence: Synthetic oligonucleotide
  Target: LAMA2; (+) strand; PAM type: YTN; PAM sequence: TTT
tgagacagggatctcactct

SEQ ID NO: 407790 - DNA, 20 bp, Artificial Sequence
  Description of Artificial Sequence: Synthetic oligonucleotide
  Target: LAMA2; (+) strand; PAM type: YTN; PAM sequence: TTT
gagacagggatctcactctg

SEQ ID NO: 407791 - DNA, 20 bp, Artificial Sequence
  Description of Artificial Sequence: Synthetic oligonucleotide
  Target: LAMA2; (+) strand; PAM type: YTN; PAM sequence: TTG
agacagggatctcactctgt

SEQ ID NO: 407792 - DNA, 20 bp, Artificial Sequence
  Description of Artificial Sequence: Synthetic oligonucleotide
  Target: LAMA2; (+) strand; PAM type: YTN; PAM sequence: CTC
actctgtagcccaggctgga

SEQ ID NO: 407793 - DNA, 20 bp, Artificial Sequence
  Description of Artificial Sequence: Synthetic oligonucleotide
  Target: LAMA2; (+) strand; PAM type: YTN; PAM sequence: CTC
tgtagcccaggctggagtgc

SEQ ID NO: 407794 - DNA, 20 bp, Artificial Sequence
  Description of Artificial Sequence: Synthetic oligonucleotide
  Target: LAMA2; (+) strand; PAM type: YTN; PAM sequence: CTG
tagcccaggctggagtgcag

SEQ ID NO: 407795 - DNA, 20 bp, Artificial Sequence
  Description of Artificial Sequence: Synthetic oligonucleotide
  Target: LAMA2; (+) strand; PAM type: YTN; PAM sequence: CTG
gagtgcagtggcacaaccat

SEQ ID NO: 407796 - DNA, 20 bp, Artificial Sequence
  Description of Artificial Sequence: Synthetic oligonucleotide
  Target: LAMA2; (+) strand; PAM type: YTN; PAM sequence: TTC
actgcagccttggcctcctg

SEQ ID NO: 407797 - DNA, 20 bp, Artificial Sequence
  Description of Artificial Sequence: Synthetic oligonucleotide
  Target: LAMA2; (+) strand; PAM type: YTN; PAM sequence: CTG
cagccttggcctcctgggct

SEQ ID NO: 407798 - DNA, 20 bp, Artificial Sequence
  Description of Artificial Sequence: Synthetic oligonucleotide
  Target: LAMA2; (+) strand; PAM type: YTN; PAM sequence: CTT
ggcctcctgggctcaaaaga

SEQ ID NO: 407799 - DNA, 20 bp, Artificial Sequence
  Description of Artificial Sequence: Synthetic oligonucleotide
  Target: LAMA2; (+) strand; PAM type: YTN; PAM sequence: TTG
gcctcctgggctcaaaagat

SEQ ID NO: 407800 - DNA, 20 bp, Artificial Sequence
  Description of Artificial Sequence: Synthetic oligonucleotide
  Target: LAMA2; (+) strand; PAM type: YTN; PAM sequence: CTC
ctgggctcaaaagatcctct

SEQ ID NO: 407801 - DNA, 20 bp, Artificial Sequence
  Description of Artificial Sequence: Synthetic oligonucleotide
  Target: LAMA2; (+) strand; PAM type: YTN; PAM sequence: CTG
ggctcaaaagatcctctctc

SEQ ID NO: 407802 - DNA, 20 bp, Artificial Sequence
  Description of Artificial Sequence: Synthetic oligonucleotide
  Target: LAMA2; (+) strand; PAM type: YTN; PAM sequence: CTC
aaaagatcctctctcctcag

SEQ ID NO: 407803 - DNA, 20 bp, Artificial Sequence
  Description of Artificial Sequence: Synthetic oligonucleotide
  Target: LAMA2; (+) strand; PAM type: YTN; PAM sequence: CTC
tctcctcagcatctccaagt

SEQ ID NO: 407804 - DNA, 20 bp, Artificial Sequence
  Description of Artificial Sequence: Synthetic oligonucleotide
  Target: LAMA2; (+) strand; PAM type: YTN; PAM sequence: CTC
tcctcagcatctccaagtaa

SEQ ID NO: 407805 - DNA, 20 bp, Artificial Sequence
  Description of Artificial Sequence: Synthetic oligonucleotide
  Target: LAMA2; (+) strand; PAM type: YTN; PAM sequence: CTC
ctcagcatctccaagtaact

SEQ ID NO: 407806 - DNA, 20 bp, Artificial Sequence
  Description of Artificial Sequence: Synthetic oligonucleotide
  Target: LAMA2; (+) strand; PAM type: YTN; PAM sequence: CTC
agcatctccaagtaactggg

SEQ ID NO: 407807 - DNA, 20 bp, Artificial Sequence
  Description of Artificial Sequence: Synthetic oligonucleotide
  Target: LAMA2; (+) strand; PAM type: YTN; PAM sequence: CTC
caagtaactgggactccagg

SEQ ID NO: 407808 - DNA, 20 bp, Artificial Sequence
  Description of Artificial Sequence: Synthetic oligonucleotide
  Target: LAMA2; (+) strand; PAM type: YTN; PAM sequence: CTG
ggactccaggcacacaccaa

SEQ ID NO: 407809 - DNA, 20 bp, Artificial Sequence
  Description of Artificial Sequence: Synthetic oligonucleotide
  Target: LAMA2; (+) strand; PAM type: YTN; PAM sequence: CTC
caggcacacaccaacatgcc

SEQ ID NO: 407810 - DNA, 20 bp, Artificial Sequence
  Description of Artificial Sequence: Synthetic oligonucleotide
  Target: LAMA2; (+) strand; PAM type: YTN; PAM sequence: CTA
ctttttttggaggggagggc

SEQ ID NO: 407811 - DNA, 20 bp, Artificial Sequence
  Description of Artificial Sequence: Synthetic oligonucleotide
  Target: LAMA2; (+) strand; PAM type: YTN; PAM sequence: CTT
tttttggaggggagggcaaa

SEQ ID NO: 407812 - DNA, 20 bp, Artificial Sequence
  Description of Artificial Sequence: Synthetic oligonucleotide
  Target: LAMA2; (+) strand; PAM type: YTN; PAM sequence: TTT
ttttggaggggagggcaaag

SEQ ID NO: 407813 - DNA, 20 bp, Artificial Sequence
  Description of Artificial Sequence: Synthetic oligonucleotide
  Target: LAMA2; (+) strand; PAM type: YTN; PAM sequence: TTT
tttggaggggagggcaaaga

SEQ ID NO: 407814 - DNA, 20 bp, Artificial Sequence
  Description of Artificial Sequence: Synthetic oligonucleotide
  Target: LAMA2; (+) strand; PAM type: YTN; PAM sequence: TTT
ttggaggggagggcaaagac

SEQ ID NO: 407815 - DNA, 20 bp, Artificial Sequence
  Description of Artificial Sequence: Synthetic oligonucleotide
  Target: LAMA2; (+) strand; PAM type: YTN; PAM sequence: TTT
tggaggggagggcaaagaca

SEQ ID NO: 407816 - DNA, 20 bp, Artificial Sequence
  Description of Artificial Sequence: Synthetic oligonucleotide
  Target: LAMA2; (+) strand; PAM type: YTN; PAM sequence: TTT
ggaggggagggcaaagacag

SEQ ID NO: 407817 - DNA, 20 bp, Artificial Sequence
  Description of Artificial Sequence: Synthetic oligonucleotide
  Target: LAMA2; (+) strand; PAM type: YTN; PAM sequence: TTG
gaggggagggcaaagacagg

SEQ ID NO: 407818 - DNA, 20 bp, Artificial Sequence
  Description of Artificial Sequence: Synthetic oligonucleotide
  Target: LAMA2; (+) strand; PAM type: YTN; PAM sequence: CTC
actctgttgcctcaggctgg

SEQ ID NO: 407819 - DNA, 20 bp, Artificial Sequence
  Description of Artificial Sequence: Synthetic oligonucleotide
  Target: LAMA2; (+) strand; PAM type: YTN; PAM sequence: CTC
tgttgcctcaggctggtctt

SEQ ID NO: 407820 - DNA, 20 bp, Artificial Sequence
  Description of Artificial Sequence: Synthetic oligonucleotide
  Target: LAMA2; (+) strand; PAM type: YTN; PAM sequence: CTG
ttgcctcaggctggtcttgt

SEQ ID NO: 407821 - DNA, 20 bp, Artificial Sequence
  Description of Artificial Sequence: Synthetic oligonucleotide
  Target: LAMA2; (+) strand; PAM type: YTN; PAM sequence: TTG
cctcaggctggtcttgtctt

SEQ ID NO: 407822 - DNA, 20 bp, Artificial Sequence
  Description of Artificial Sequence: Synthetic oligonucleotide
  Target: LAMA2; (+) strand; PAM type: YTN; PAM sequence: CTC
aggctggtcttgtcttgaac

SEQ ID NO: 407823 - DNA, 20 bp, Artificial Sequence
  Description of Artificial Sequence: Synthetic oligonucleotide
  Target: LAMA2; (+) strand; PAM type: YTN; PAM sequence: CTG
gtcttgtcttgaactcgtgg

SEQ ID NO: 407824 - DNA, 20 bp, Artificial Sequence
  Description of Artificial Sequence: Synthetic oligonucleotide
  Target: LAMA2; (+) strand; PAM type: YTN; PAM sequence: CTT
gtcttgaactcgtggcctca

SEQ ID NO: 407825 - DNA, 20 bp, Artificial Sequence
  Description of Artificial Sequence: Synthetic oligonucleotide
  Target: LAMA2; (+) strand; PAM type: YTN; PAM sequence: TTG
tcttgaactcgtggcctcaa

SEQ ID NO: 407826 - DNA, 20 bp, Artificial Sequence
  Description of Artificial Sequence: Synthetic oligonucleotide
  Target: LAMA2; (+) strand; PAM type: YTN; PAM sequence: CTT
gaactcgtggcctcaagcga

SEQ ID NO: 407827 - DNA, 20 bp, Artificial Sequence
  Description of Artificial Sequence: Synthetic oligonucleotide
  Target: LAMA2; (+) strand; PAM type: YTN; PAM sequence: TTG
aactcgtggcctcaagcgat

SEQ ID NO: 407828 - DNA, 20 bp, Artificial Sequence
  Description of Artificial Sequence: Synthetic oligonucleotide
  Target: LAMA2; (+) strand; PAM type: YTN; PAM sequence: CTC
gtggcctcaagcgatcctcc

SEQ ID NO: 407829 - DNA, 20 bp, Artificial Sequence
  Description of Artificial Sequence: Synthetic oligonucleotide
  Target: LAMA2; (+) strand; PAM type: YTN; PAM sequence: CTC
aagcgatcctccctcttcgg

SEQ ID NO: 407830 - DNA, 20 bp, Artificial Sequence
  Description of Artificial Sequence: Synthetic oligonucleotide
  Target: LAMA2; (+) strand; PAM type: YTN; PAM sequence: CTC
cctcttcggcctcccaaaat

SEQ ID NO: 407831 - DNA, 20 bp, Artificial Sequence
  Description of Artificial Sequence: Synthetic oligonucleotide
  Target: LAMA2; (+) strand; PAM type: YTN; PAM sequence: CTC
ttcggcctcccaaaatgcag

SEQ ID NO: 407832 - DNA, 20 bp, Artificial Sequence
  Description of Artificial Sequence: Synthetic oligonucleotide
  Target: LAMA2; (+) strand; PAM type: YTN; PAM sequence: CTT
cggcctcccaaaatgcaggg

SEQ ID NO: 407833 - DNA, 20 bp, Artificial Sequence
  Description of Artificial Sequence: Synthetic oligonucleotide
  Target: LAMA2; (+) strand; PAM type: YTN; PAM sequence: TTC
ggcctcccaaaatgcaggga

SEQ ID NO: 407834 - DNA, 20 bp, Artificial Sequence
  Description of Artificial Sequence: Synthetic oligonucleotide
  Target: LAMA2; (+) strand; PAM type: YTN; PAM sequence: CTC
ccaaaatgcagggattacag

SEQ ID NO: 407835 - DNA, 20 bp, Artificial Sequence
  Description of Artificial Sequence: Synthetic oligonucleotide
  Target: LAMA2; (+) strand; PAM type: YTN; PAM sequence: TTA
caggaatgagccactacact

SEQ ID NO: 407836 - DNA, 20 bp, Artificial Sequence
  Description of Artificial Sequence: Synthetic oligonucleotide
  Target: LAMA2; (+) strand; PAM type: YTN; PAM sequence: CTA
cactcggccagtaaacctaa

SEQ ID NO: 407837 - DNA, 20 bp, Artificial Sequence
  Description of Artificial Sequence: Synthetic oligonucleotide
  Target: LAMA2; (+) strand; PAM type: YTN; PAM sequence: CTC
ggccagtaaacctaattttt

SEQ ID NO: 407838 - DNA, 20 bp, Artificial Sequence
  Description of Artificial Sequence: Synthetic oligonucleotide
  Target: LAMA2; (+) strand; PAM type: YTN; PAM sequence: CTA
atttttaaacatctgttttt

SEQ ID NO: 407839 - DNA, 20 bp, Artificial Sequence
  Description of Artificial Sequence: Synthetic oligonucleotide
  Target: LAMA2; (+) strand; PAM type: YTN; PAM sequence: TTT
ttaaacatctgttttttaga

SEQ ID NO: 407840 - DNA, 20 bp, Artificial Sequence
  Description of Artificial Sequence: Synthetic oligonucleotide
  Target: LAMA2; (+) strand; PAM type: YTN; PAM sequence: TTT
taaacatctgttttttagac

SEQ ID NO: 407841 - DNA, 20 bp, Artificial Sequence
  Description of Artificial Sequence: Synthetic oligonucleotide
  Target: LAMA2; (+) strand; PAM type: YTN; PAM sequence: TTT
aaacatctgttttttagact

SEQ ID NO: 407842 - DNA, 20 bp, Artificial Sequence
  Description of Artificial Sequence: Synthetic oligonucleotide
  Target: LAMA2; (+) strand; PAM type: YTN; PAM sequence: TTA
aacatctgttttttagacta

SEQ ID NO: 407843 - DNA, 20 bp, Artificial Sequence
  Description of Artificial Sequence: Synthetic oligonucleotide
  Target: LAMA2; (+) strand; PAM type: YTN; PAM sequence: CTG
ttttttagactatataatcc

SEQ ID NO: 407844 - DNA, 20 bp, Artificial Sequence
  Description of Artificial Sequence: Synthetic oligonucleotide
  Target: LAMA2; (+) strand; PAM type: YTN; PAM sequence: TTT
tttagactatataatccaaa

SEQ ID NO: 407845 - DNA, 20 bp, Artificial Sequence
  Description of Artificial Sequence: Synthetic oligonucleotide
  Target: LAMA2; (+) strand; PAM type: YTN; PAM sequence: TTT
ttagactatataatccaaaa

SEQ ID NO: 407846 - DNA, 20 bp, Artificial Sequence
  Description of Artificial Sequence: Synthetic oligonucleotide
  Target: LAMA2; (+) strand; PAM type: YTN; PAM sequence: TTT
tagactatataatccaaaag

SEQ ID NO: 407847 - DNA, 20 bp, Artificial Sequence
  Description of Artificial Sequence: Synthetic oligonucleotide
  Target: LAMA2; (+) strand; PAM type: YTN; PAM sequence: TTT
agactatataatccaaaaga

SEQ ID NO: 407848 - DNA, 20 bp, Artificial Sequence
  Description of Artificial Sequence: Synthetic oligonucleotide
  Target: LAMA2; (+) strand; PAM type: YTN; PAM sequence: TTA
gactatataatccaaaagaa

SEQ ID NO: 407849 - DNA, 20 bp, Artificial Sequence
  Description of Artificial Sequence: Synthetic oligonucleotide
  Target: LAMA2; (+) strand; PAM type: YTN; PAM sequence: CTA
tataatccaaaagaatgttt

SEQ ID NO: 407850 - DNA, 20 bp, Artificial Sequence
  Description of Artificial Sequence: Synthetic oligonucleotide
  Target: LAMA2; (+) strand; PAM type: YTN; PAM sequence: TTT
cttggactttgttttactta

SEQ ID NO: 407851 - DNA, 20 bp, Artificial Sequence
  Description of Artificial Sequence: Synthetic oligonucleotide
  Target: LAMA2; (+) strand; PAM type: YTN; PAM sequence: TTC
ttggactttgttttacttaa

SEQ ID NO: 407852 - DNA, 20 bp, Artificial Sequence
  Description of Artificial Sequence: Synthetic oligonucleotide
  Target: LAMA2; (+) strand; PAM type: YTN; PAM sequence: CTT
ggactttgttttacttaaaa

SEQ ID NO: 407853 - DNA, 20 bp, Artificial Sequence
  Description of Artificial Sequence: Synthetic oligonucleotide
  Target: LAMA2; (+) strand; PAM type: YTN; PAM sequence: TTG
gactttgttttacttaaaag

SEQ ID NO: 407854 - DNA, 20 bp, Artificial Sequence
  Description of Artificial Sequence: Synthetic oligonucleotide
  Target: LAMA2; (+) strand; PAM type: YTN; PAM sequence: CTT
tgttttacttaaaagcctta

SEQ ID NO: 407855 - DNA, 20 bp, Artificial Sequence
  Description of Artificial Sequence: Synthetic oligonucleotide
  Target: LAMA2; (+) strand; PAM type: YTN; PAM sequence: TTT
gttttacttaaaagccttaa

SEQ ID NO: 407856 - DNA, 20 bp, Artificial Sequence
  Description of Artificial Sequence: Synthetic oligonucleotide
  Target: LAMA2; (+) strand; PAM type: YTN; PAM sequence: TTG
ttttacttaaaagccttaaa

SEQ ID NO: 407857 - DNA, 20 bp, Artificial Sequence
  Description of Artificial Sequence: Synthetic oligonucleotide
  Target: LAMA2; (+) strand; PAM type: YTN; PAM sequence: TTT
tacttaaaagccttaaagag

SEQ ID NO: 407858 - DNA, 20 bp, Artificial Sequence
  Description of Artificial Sequence: Synthetic oligonucleotide
  Target: LAMA2; (+) strand; PAM type: YTN; PAM sequence: TTT
acttaaaagccttaaagaga

SEQ ID NO: 407859 - DNA, 20 bp, Artificial Sequence
  Description of Artificial Sequence: Synthetic oligonucleotide
  Target: LAMA2; (+) strand; PAM type: YTN; PAM sequence: TTA
cttaaaagccttaaagagat

SEQ ID NO: 407860 - DNA, 20 bp, Artificial Sequence
  Description of Artificial Sequence: Synthetic oligonucleotide
  Target: LAMA2; (+) strand; PAM type: YTN; PAM sequence: CTT
aaaagccttaaagagatatg

SEQ ID NO: 407861 - DNA, 20 bp, Artificial Sequence
  Description of Artificial Sequence: Synthetic oligonucleotide
  Target: LAMA2; (+) strand; PAM type: YTN; PAM sequence: TTA
aaagccttaaagagatatgt

SEQ ID NO: 407862 - DNA, 20 bp, Artificial Sequence
  Description of Artificial Sequence: Synthetic oligonucleotide
  Target: LAMA2; (+) strand; PAM type: YTN; PAM sequence: CTT
aaagagatatgtaatattat

SEQ ID NO: 407863 - DNA, 20 bp, Artificial Sequence
  Description of Artificial Sequence: Synthetic oligonucleotide
  Target: LAMA2; (+) strand; PAM type: YTN; PAM sequence: TTA
aagagatatgtaatattatc

SEQ ID NO: 407864 - DNA, 20 bp, Artificial Sequence
  Description of Artificial Sequence: Synthetic oligonucleotide
  Target: LAMA2; (+) strand; PAM type: YTN; PAM sequence: TTA
tcttattttttagctatctc

SEQ ID NO: 407865 - DNA, 20 bp, Artificial Sequence
  Description of Artificial Sequence: Synthetic oligonucleotide
  Target: LAMA2; (+) strand; PAM type: YTN; PAM sequence: CTT
attttttagctatctcccaa

SEQ ID NO: 407866 - DNA, 20 bp, Artificial Sequence
  Description of Artificial Sequence: Synthetic oligonucleotide
  Target: LAMA2; (+) strand; PAM type: YTN; PAM sequence: TTA
ttttttagctatctcccaag

SEQ ID NO: 407867 - DNA, 20 bp, Artificial Sequence
  Description of Artificial Sequence: Synthetic oligonucleotide
  Target: LAMA2; (+) strand; PAM type: YTN; PAM sequence: TTT
tttagctatctcccaagaaa

SEQ ID NO: 407868 - DNA, 20 bp, Artificial Sequence
  Description of Artificial Sequence: Synthetic oligonucleotide
  Target: LAMA2; (+) strand; PAM type: YTN; PAM sequence: TTT
ttagctatctcccaagaaaa

SEQ ID NO: 407869 - DNA, 20 bp, Artificial Sequence
  Description of Artificial Sequence: Synthetic oligonucleotide
  Target: LAMA2; (+) strand; PAM type: YTN; PAM sequence: TTT
tagctatctcccaagaaaaa

SEQ ID NO: 407870 - DNA, 20 bp, Artificial Sequence
  Description of Artificial Sequence: Synthetic oligonucleotide
  Target: LAMA2; (+) strand; PAM type: YTN; PAM sequence: TTT
agctatctcccaagaaaaag

SEQ ID NO: 407871 - DNA, 20 bp, Artificial Sequence
  Description of Artificial Sequence: Synthetic oligonucleotide
  Target: LAMA2; (+) strand; PAM type: YTN; PAM sequence: TTA
gctatctcccaagaaaaagc

SEQ ID NO: 407872 - DNA, 20 bp, Artificial Sequence
  Description of Artificial Sequence: Synthetic oligonucleotide
  Target: LAMA2; (+) strand; PAM type: YTN; PAM sequence: CTA
tctcccaagaaaaagcctca

SEQ ID NO: 407873 - DNA, 20 bp, Artificial Sequence
  Description of Artificial Sequence: Synthetic oligonucleotide
  Target: LAMA2; (+) strand; PAM type: YTN; PAM sequence: CTC
ccaagaaaaagcctcaaata

SEQ ID NO: 407874 - DNA, 20 bp, Artificial Sequence
  Description of Artificial Sequence: Synthetic oligonucleotide
  Target: LAMA2; (+) strand; PAM type: YTN; PAM sequence: CTC
aaataaaaaaaaatcttttt

SEQ ID NO: 407875 - DNA, 20 bp, Artificial Sequence
  Description of Artificial Sequence: Synthetic oligonucleotide
  Target: LAMA2; (+) strand; PAM type: YTN; PAM sequence: CTT
tttcaaaataaataaacgtt

SEQ ID NO: 407876 - DNA, 20 bp, Artificial Sequence
  Description of Artificial Sequence: Synthetic oligonucleotide
  Target: LAMA2; (+) strand; PAM type: YTN; PAM sequence: TTT
ttcaaaataaataaacgttt

SEQ ID NO: 407877 - DNA, 20 bp, Artificial Sequence
  Description of Artificial Sequence: Synthetic oligonucleotide
  Target: LAMA2; (+) strand; PAM type: YTN; PAM sequence: TTT
tcaaaataaataaacgtttt

SEQ ID NO: 407878 - DNA, 20 bp, Artificial Sequence
  Description of Artificial Sequence: Synthetic oligonucleotide
  Target: LAMA2; (+) strand; PAM type: YTN; PAM sequence: TTT
caaaataaataaacgttttc

SEQ ID NO: 407879 - DNA, 20 bp, Artificial Sequence
  Description of Artificial Sequence: Synthetic oligonucleotide
  Target: LAMA2; (+) strand; PAM type: YTN; PAM sequence: TTC
aaaataaataaacgttttca

SEQ ID NO: 407880 - DNA, 20 bp, Artificial Sequence
  Description of Artificial Sequence: Synthetic oligonucleotide
  Target: LAMA2; (+) strand; PAM type: YTN; PAM sequence: TTT
tcagatttttttttctaact

SEQ ID NO: 407881 - DNA, 20 bp, Artificial Sequence
  Description of Artificial Sequence: Synthetic oligonucleotide
  Target: LAMA2; (+) strand; PAM type: YTN; PAM sequence: TTT
cagatttttttttctaactt

SEQ ID NO: 407882 - DNA, 20 bp, Artificial Sequence
  Description of Artificial Sequence: Synthetic oligonucleotide
  Target: LAMA2; (+) strand; PAM type: YTN; PAM sequence: TTC
agatttttttttctaacttt

SEQ ID NO: 407883 - DNA, 20 bp, Artificial Sequence
  Description of Artificial Sequence: Synthetic oligonucleotide
  Target: LAMA2; (+) strand; PAM type: YTN; PAM sequence: TTT
ttttttctaacttttgagca

SEQ ID NO: 407884 - DNA, 20 bp, Artificial Sequence
  Description of Artificial Sequence: Synthetic oligonucleotide
  Target: LAMA2; (+) strand; PAM type: YTN; PAM sequence: TTT
tttttctaacttttgagcaa

SEQ ID NO: 407885 - DNA, 20 bp, Artificial Sequence
  Description of Artificial Sequence: Synthetic oligonucleotide
  Target: LAMA2; (+) strand; PAM type: YTN; PAM sequence: TTT
ttttctaacttttgagcaag

SEQ ID NO: 407886 - DNA, 20 bp, Artificial Sequence
  Description of Artificial Sequence: Synthetic oligonucleotide
  Target: LAMA2; (+) strand; PAM type: YTN; PAM sequence: TTT
tttctaacttttgagcaagg

SEQ ID NO: 407887 - DNA, 20 bp, Artificial Sequence
  Description of Artificial Sequence: Synthetic oligonucleotide
  Target: LAMA2; (+) strand; PAM type: YTN; PAM sequence: TTT
ttctaacttttgagcaaggt

SEQ ID NO: 407888 - DNA, 20 bp, Artificial Sequence
  Description of Artificial Sequence: Synthetic oligonucleotide
  Target: LAMA2; (+) strand; PAM type: YTN; PAM sequence: TTT
tctaacttttgagcaaggtt

SEQ ID NO: 407889 - DNA, 20 bp, Artificial Sequence
  Description of Artificial Sequence: Synthetic oligonucleotide
  Target: LAMA2; (+) strand; PAM type: YTN; PAM sequence: TTT
ctaacttttgagcaaggttt

SEQ ID NO: 407890 - DNA, 20 bp, Artificial Sequence
  Description of Artificial Sequence: Synthetic oligonucleotide
  Target: LAMA2; (+) strand; PAM type: YTN; PAM sequence: TTC
taacttttgagcaaggtttt

SEQ ID NO: 407891 - DNA, 20 bp, Artificial Sequence
  Description of Artificial Sequence: Synthetic oligonucleotide
  Target: LAMA2; (+) strand; PAM type: YTN; PAM sequence: CTA
acttttgagcaaggttttta

SEQ ID NO: 407892 - DNA, 20 bp, Artificial Sequence
  Description of Artificial Sequence: Synthetic oligonucleotide
  Target: LAMA2; (+) strand; PAM type: YTN; PAM sequence: CTT
ttgagcaaggtttttaaaaa

SEQ ID NO: 407893 - DNA, 20 bp, Artificial Sequence
  Description of Artificial Sequence: Synthetic oligonucleotide
  Target: LAMA2; (+) strand; PAM type: YTN; PAM sequence: TTT
tgagcaaggtttttaaaaac

SEQ ID NO: 407894 - DNA, 20 bp, Artificial Sequence
  Description of Artificial Sequence: Synthetic oligonucleotide
  Target: LAMA2; (+) strand; PAM type: YTN; PAM sequence: TTT
gagcaaggtttttaaaaact

SEQ ID NO: 407895 - DNA, 20 bp, Artificial Sequence
  Description of Artificial Sequence: Synthetic oligonucleotide
  Target: LAMA2; (+) strand; PAM type: YTN; PAM sequence: TTG
agcaaggtttttaaaaactt

SEQ ID NO: 407896 - DNA, 20 bp, Artificial Sequence
  Description of Artificial Sequence: Synthetic oligonucleotide
  Target: LAMA2; (+) strand; PAM type: YTN; PAM sequence: TTT
ttaaaaactttttggtatat

SEQ ID NO: 407897 - DNA, 20 bp, Artificial Sequence
  Description of Artificial Sequence: Synthetic oligonucleotide
  Target: LAMA2; (+) strand; PAM type: YTN; PAM sequence: TTT
taaaaactttttggtatata

SEQ ID NO: 407898 - DNA, 20 bp, Artificial Sequence
  Description of Artificial Sequence: Synthetic oligonucleotide
  Target: LAMA2; (+) strand; PAM type: YTN; PAM sequence: TTT
aaaaactttttggtatatag

SEQ ID NO: 407899 - DNA, 20 bp, Artificial Sequence
  Description of Artificial Sequence: Synthetic oligonucleotide
  Target: LAMA2; (+) strand; PAM type: YTN; PAM sequence: TTA
aaaactttttggtatatagt

SEQ ID NO: 407900 - DNA, 20 bp, Artificial Sequence
  Description of Artificial Sequence: Synthetic oligonucleotide
  Target: LAMA2; (+) strand; PAM type: YTN; PAM sequence: CTT
tttggtatatagtttgttta

SEQ ID NO: 407901 - DNA, 20 bp, Artificial Sequence
  Description of Artificial Sequence: Synthetic oligonucleotide
  Target: LAMA2; (+) strand; PAM type: YTN; PAM sequence: TTT
ttggtatatagtttgtttat

SEQ ID NO: 407902 - DNA, 20 bp, Artificial Sequence
  Description of Artificial Sequence: Synthetic oligonucleotide
  Target: LAMA2; (+) strand; PAM type: YTN; PAM sequence: TTT
tggtatatagtttgtttatg

SEQ ID NO: 407903 - DNA, 20 bp, Artificial Sequence
  Description of Artificial Sequence: Synthetic oligonucleotide
  Target: LAMA2; (+) strand; PAM type: YTN; PAM sequence: TTT
ggtatatagtttgtttatgc

SEQ ID NO: 407904 - DNA, 20 bp, Artificial Sequence
  Description of Artificial Sequence: Synthetic oligonucleotide
  Target: LAMA2; (+) strand; PAM type: YTN; PAM sequence: TTG
gtatatagtttgtttatgct

SEQ ID NO: 407905 - DNA, 20 bp, Artificial Sequence
  Description of Artificial Sequence: Synthetic oligonucleotide
  Target: LAMA2; (+) strand; PAM type: YTN; PAM sequence: TTT
gtttatgctgcctatgcaat

SEQ ID NO: 407906 - DNA, 20 bp, Artificial Sequence
  Description of Artificial Sequence: Synthetic oligonucleotide
  Target: LAMA2; (+) strand; PAM type: YTN; PAM sequence: TTG
tttatgctgcctatgcaatt

SEQ ID NO: 407907 - DNA, 20 bp, Artificial Sequence
  Description of Artificial Sequence: Synthetic oligonucleotide
  Target: LAMA2; (+) strand; PAM type: YTN; PAM sequence: TTT
atgctgcctatgcaattatc

SEQ ID NO: 407908 - DNA, 20 bp, Artificial Sequence
  Description of Artificial Sequence: Synthetic oligonucleotide
  Target: LAMA2; (+) strand; PAM type: YTN; PAM sequence: TTA
tgctgcctatgcaattatct

SEQ ID NO: 407909 - DNA, 20 bp, Artificial Sequence
  Description of Artificial Sequence: Synthetic oligonucleotide
  Target: LAMA2; (+) strand; PAM type: YTN; PAM sequence: CTG
cctatgcaattatcttctct

SEQ ID NO: 407910 - DNA, 20 bp, Artificial Sequence
  Description of Artificial Sequence: Synthetic oligonucleotide
  Target: LAMA2; (+) strand; PAM type: YTN; PAM sequence: CTA
tgcaattatcttctctttgg

SEQ ID NO: 407911 - DNA, 20 bp, Artificial Sequence
  Description of Artificial Sequence: Synthetic oligonucleotide
  Target: LAMA2; (+) strand; PAM type: YTN; PAM sequence: TTA
tcttctctttggtgaaaaaa

SEQ ID NO: 407912 - DNA, 20 bp, Artificial Sequence
  Description of Artificial Sequence: Synthetic oligonucleotide
  Target: LAMA2; (+) strand; PAM type: YTN; PAM sequence: CTT
ctctttggtgaaaaaaataa

SEQ ID NO: 407913 - DNA, 20 bp, Artificial Sequence
  Description of Artificial Sequence: Synthetic oligonucleotide
  Target: LAMA2; (+) strand; PAM type: YTN; PAM sequence: TTC
tctttggtgaaaaaaataaa

SEQ ID NO: 407914 - DNA, 20 bp, Artificial Sequence
  Description of Artificial Sequence: Synthetic oligonucleotide
  Target: LAMA2; (+) strand; PAM type: YTN; PAM sequence: CTC
tttggtgaaaaaaataaaac

SEQ ID NO: 407915 - DNA, 20 bp, Artificial Sequence
  Description of Artificial Sequence: Synthetic oligonucleotide
  Target: LAMA2; (+) strand; PAM type: YTN; PAM sequence: CTT
tggtgaaaaaaataaaactt

SEQ ID NO: 407916 - DNA, 20 bp, Artificial Sequence
  Description of Artificial Sequence: Synthetic oligonucleotide
  Target: LAMA2; (+) strand; PAM type: YTN; PAM sequence: TTT
ggtgaaaaaaataaaactta

SEQ ID NO: 407917 - DNA, 20 bp, Artificial Sequence
  Description of Artificial Sequence: Synthetic oligonucleotide
  Target: LAMA2; (+) strand; PAM type: YTN; PAM sequence: TTG
gtgaaaaaaataaaacttat

SEQ ID NO: 407918 - DNA, 20 bp, Artificial Sequence
  Description of Artificial Sequence: Synthetic oligonucleotide
  Target: LAMA2; (+) strand; PAM type: YTN; PAM sequence: CTT
atttcattacacatataaag

SEQ ID NO: 407919 - DNA, 20 bp, Artificial Sequence
  Description of Artificial Sequence: Synthetic oligonucleotide
  Target: LAMA2; (+) strand; PAM type: YTN; PAM sequence: TTA
tttcattacacatataaagc

SEQ ID NO: 407920 - DNA, 20 bp, Artificial Sequence
  Description of Artificial Sequence: Synthetic oligonucleotide
  Target: LAMA2; (+) strand; PAM type: YTN; PAM sequence: TTT
cattacacatataaagcatc

SEQ ID NO: 407921 - DNA, 20 bp, Artificial Sequence
  Description of Artificial Sequence: Synthetic oligonucleotide
  Target: LAMA2; (+) strand; PAM type: YTN; PAM sequence: TTC
attacacatataaagcatca

SEQ ID NO: 407922 - DNA, 20 bp, Artificial Sequence
  Description of Artificial Sequence: Synthetic oligonucleotide
  Target: LAMA2; (+) strand; PAM type: YTN; PAM sequence: TTA
cacatataaagcatcaataa

SEQ ID NO: 407923 - DNA, 20 bp, Artificial Sequence
  Description of Artificial Sequence: Synthetic oligonucleotide
  Target: LAMA2; (+) strand; PAM type: YTN; PAM sequence: TTA
attcctgtacctcatgttta

SEQ ID NO: 407924 - DNA, 20 bp, Artificial Sequence
  Description of Artificial Sequence: Synthetic oligonucleotide
  Target: LAMA2; (+) strand; PAM type: YTN; PAM sequence: TTC
ctgtacctcatgtttaaatg

SEQ ID NO: 407925 - DNA, 20 bp, Artificial Sequence
  Description of Artificial Sequence: Synthetic oligonucleotide
  Target: LAMA2; (+) strand; PAM type: YTN; PAM sequence: CTG
tacctcatgtttaaatgctg

SEQ ID NO: 407926 - DNA, 20 bp, Artificial Sequence
  Description of Artificial Sequence: Synthetic oligonucleotide
  Target: LAMA2; (+) strand; PAM type: YTN; PAM sequence: CTC
atgtttaaatgctgtgggtg

SEQ ID NO: 407927 - DNA, 20 bp, Artificial Sequence
  Description of Artificial Sequence: Synthetic oligonucleotide
  Target: LAMA2; (+) strand; PAM type: YTN; PAM sequence: TTT
aaatgctgtgggtgagatta

SEQ ID NO: 407928 - DNA, 20 bp, Artificial Sequence
  Description of Artificial Sequence: Synthetic oligonucleotide
  Target: LAMA2; (+) strand; PAM type: YTN; PAM sequence: TTA
aatgctgtgggtgagattat

SEQ ID NO: 407929 - DNA, 20 bp, Artificial Sequence
  Description of Artificial Sequence: Synthetic oligonucleotide
  Target: LAMA2; (+) strand; PAM type: YTN; PAM sequence: CTG
tgggtgagattattgctaaa

SEQ ID NO: 407930 - DNA, 20 bp, Artificial Sequence
  Description of Artificial Sequence: Synthetic oligonucleotide
  Target: LAMA2; (+) strand; PAM type: YTN; PAM sequence: TTA
ttgctaaaggggagaaggac

SEQ ID NO: 407931 - DNA, 20 bp, Artificial Sequence
  Description of Artificial Sequence: Synthetic oligonucleotide
  Target: LAMA2; (+) strand; PAM type: YTN; PAM sequence: TTG
ctaaaggggagaaggactac

SEQ ID NO: 407932 - DNA, 20 bp, Artificial Sequence
  Description of Artificial Sequence: Synthetic oligonucleotide
  Target: LAMA2; (+) strand; PAM type: YTN; PAM sequence: CTA
aaggggagaaggactacaaa

SEQ ID NO: 407933 - DNA, 20 bp, Artificial Sequence
  Description of Artificial Sequence: Synthetic oligonucleotide
  Target: LAMA2; (+) strand; PAM type: YTN; PAM sequence: CTA
caaaaagactccttctgcag

SEQ ID NO: 407934 - DNA, 20 bp, Artificial Sequence
  Description of Artificial Sequence: Synthetic oligonucleotide
  Target: LAMA2; (+) strand; PAM type: YTN; PAM sequence: CTC
cttctgcaggataacatgaa

SEQ ID NO: 407935 - DNA, 20 bp, Artificial Sequence
  Description of Artificial Sequence: Synthetic oligonucleotide
  Target: LAMA2; (+) strand; PAM type: YTN; PAM sequence: CTT
ctgcaggataacatgaacat

SEQ ID NO: 407936 - DNA, 20 bp, Artificial Sequence
  Description of Artificial Sequence: Synthetic oligonucleotide
  Target: LAMA2; (+) strand; PAM type: YTN; PAM sequence: TTC
tgcaggataacatgaacatc

SEQ ID NO: 407937 - DNA, 20 bp, Artificial Sequence
  Description of Artificial Sequence: Synthetic oligonucleotide
  Target: LAMA2; (+) strand; PAM type: YTN; PAM sequence: CTG
caggataacatgaacatcca

SEQ ID NO: 407938 - DNA, 20 bp, Artificial Sequence
  Description of Artificial Sequence: Synthetic oligonucleotide
  Target: LAMA2; (+) strand; PAM type: YTN; PAM sequence: TTT
agaccaaccagtagacaatg

SEQ ID NO: 407939 - DNA, 20 bp, Artificial Sequence
  Description of Artificial Sequence: Synthetic oligonucleotide
  Target: LAMA2; (+) strand; PAM type: YTN; PAM sequence: TTA
gaccaaccagtagacaatgg

SEQ ID NO: 407940 - DNA, 20 bp, Artificial Sequence
  Description of Artificial Sequence: Synthetic oligonucleotide
  Target: LAMA2; (+) strand; PAM type: YTN; PAM sequence: TTT
gctgggtacacgtgtgcaca

SEQ ID NO: 407941 - DNA, 20 bp, Artificial Sequence
  Description of Artificial Sequence: Synthetic oligonucleotide
  Target: LAMA2; (+) strand; PAM type: YTN; PAM sequence: TTG
ctgggtacacgtgtgcacag

SEQ ID NO: 407942 - DNA, 20 bp, Artificial Sequence
  Description of Artificial Sequence: Synthetic oligonucleotide
  Target: LAMA2; (+) strand; PAM type: YTN; PAM sequence: CTG
ggtacacgtgtgcacagttt

SEQ ID NO: 407943 - DNA, 20 bp, Artificial Sequence
  Description of Artificial Sequence: Synthetic oligonucleotide
  Target: LAMA2; (+) strand; PAM type: YTN; PAM sequence: TTT
gatagacatgtgcctgcatg

SEQ ID NO: 407944 - DNA, 20 bp, Artificial Sequence
  Description of Artificial Sequence: Synthetic oligonucleotide
  Target: LAMA2; (+) strand; PAM type: YTN; PAM sequence: TTG
atagacatgtgcctgcatgt

SEQ ID NO: 407945 - DNA, 20 bp, Artificial Sequence
  Description of Artificial Sequence: Synthetic oligonucleotide
  Target: LAMA2; (+) strand; PAM type: YTN; PAM sequence: CTG
catgtgtctgctccacaagg

SEQ ID NO: 407946 - DNA, 20 bp, Artificial Sequence
  Description of Artificial Sequence: Synthetic oligonucleotide
  Target: LAMA2; (+) strand; PAM type: YTN; PAM sequence: CTG
ctccacaaggcttccttccc

SEQ ID NO: 407947 - DNA, 20 bp, Artificial Sequence
  Description of Artificial Sequence: Synthetic oligonucleotide
  Target: LAMA2; (+) strand; PAM type: YTN; PAM sequence: CTC
cacaaggcttccttcccata

SEQ ID NO: 407948 - DNA, 20 bp, Artificial Sequence
  Description of Artificial Sequence: Synthetic oligonucleotide
  Target: LAMA2; (+) strand; PAM type: YTN; PAM sequence: CTT
ccttcccatagtcagagact

SEQ ID NO: 407949 - DNA, 20 bp, Artificial Sequence
  Description of Artificial Sequence: Synthetic oligonucleotide
  Target: LAMA2; (+) strand; PAM type: YTN; PAM sequence: TTC
cttcccatagtcagagacta

SEQ ID NO: 407950 - DNA, 20 bp, Artificial Sequence
  Description of Artificial Sequence: Synthetic oligonucleotide
  Target: LAMA2; (+) strand; PAM type: YTN; PAM sequence: CTT
cccatagtcagagactacac

SEQ ID NO: 407951 - DNA, 20 bp, Artificial Sequence
  Description of Artificial Sequence: Synthetic oligonucleotide
  Target: LAMA2; (+) strand; PAM type: YTN; PAM sequence: TTC
ccatagtcagagactacact

SEQ ID NO: 407952 - DNA, 20 bp, Artificial Sequence
  Description of Artificial Sequence: Synthetic oligonucleotide
  Target: LAMA2; (+) strand; PAM type: YTN; PAM sequence: CTA
cactaccatcaccctaatga

SEQ ID NO: 407953 - DNA, 20 bp, Artificial Sequence
  Description of Artificial Sequence: Synthetic oligonucleotide
  Target: LAMA2; (+) strand; PAM type: YTN; PAM sequence: CTA
ccatcaccctaatgatattg

SEQ ID NO: 407954 - DNA, 20 bp, Artificial Sequence
  Description of Artificial Sequence: Synthetic oligonucleotide
  Target: LAMA2; (+) strand; PAM type: YTN; PAM sequence: CTA
atgatattgcttttgctttt

SEQ ID NO: 407955 - DNA, 20 bp, Artificial Sequence
  Description of Artificial Sequence: Synthetic oligonucleotide
  Target: LAMA2; (+) strand; PAM type: YTN; PAM sequence: TTG
cttttgcttttcatttgact

SEQ ID NO: 407956 - DNA, 20 bp, Artificial Sequence
  Description of Artificial Sequence: Synthetic oligonucleotide
  Target: LAMA2; (+) strand; PAM type: YTN; PAM sequence: CTT
ttgcttttcatttgactatt

SEQ ID NO: 407957 - DNA, 20 bp, Artificial Sequence
  Description of Artificial Sequence: Synthetic oligonucleotide
  Target: LAMA2; (+) strand; PAM type: YTN; PAM sequence: TTT
tgcttttcatttgactattc

SEQ ID NO: 407958 - DNA, 20 bp, Artificial Sequence
  Description of Artificial Sequence: Synthetic oligonucleotide
  Target: LAMA2; (+) strand; PAM type: YTN; PAM sequence: TTT
gcttttcatttgactattca

SEQ ID NO: 407959 - DNA, 20 bp, Artificial Sequence
  Description of Artificial Sequence: Synthetic oligonucleotide
  Target: LAMA2; (+) strand; PAM type: YTN; PAM sequence: TTG
cttttcatttgactattcaa

SEQ ID NO: 407960 - DNA, 20 bp, Artificial Sequence
  Description of Artificial Sequence: Synthetic oligonucleotide
  Target: LAMA2; (+) strand; PAM type: YTN; PAM sequence: CTT
ttcatttgactattcaatag

SEQ ID NO: 407961 - DNA, 20 bp, Artificial Sequence
  Description of Artificial Sequence: Synthetic oligonucleotide
  Target: LAMA2; (+) strand; PAM type: YTN; PAM sequence: TTT
tcatttgactattcaatagg

SEQ ID NO: 407962 - DNA, 20 bp, Artificial Sequence
  Description of Artificial Sequence: Synthetic oligonucleotide
  Target: LAMA2; (+) strand; PAM type: YTN; PAM sequence: TTT
catttgactattcaataggc

SEQ ID NO: 407963 - DNA, 20 bp, Artificial Sequence
  Description of Artificial Sequence: Synthetic oligonucleotide
  Target: LAMA2; (+) strand; PAM type: YTN; PAM sequence: TTC
atttgactattcaataggcc

SEQ ID NO: 407964 - DNA, 20 bp, Artificial Sequence
  Description of Artificial Sequence: Synthetic oligonucleotide
  Target: LAMA2; (+) strand; PAM type: YTN; PAM sequence: TTT
gactattcaataggccagaa

SEQ ID NO: 407965 - DNA, 20 bp, Artificial Sequence
  Description of Artificial Sequence: Synthetic oligonucleotide
  Target: LAMA2; (+) strand; PAM type: YTN; PAM sequence: TTG
actattcaataggccagaag

SEQ ID NO: 407966 - DNA, 20 bp, Artificial Sequence
  Description of Artificial Sequence: Synthetic oligonucleotide
  Target: LAMA2; (+) strand; PAM type: YTN; PAM sequence: CTA
ttcaataggccagaagtaaa

SEQ ID NO: 407967 - DNA, 20 bp, Artificial Sequence
  Description of Artificial Sequence: Synthetic oligonucleotide
  Target: LAMA2; (+) strand; PAM type: YTN; PAM sequence: TTC
aataggccagaagtaaatct

SEQ ID NO: 407968 - DNA, 20 bp, Artificial Sequence
  Description of Artificial Sequence: Synthetic oligonucleotide
  Target: LAMA2; (+) strand; PAM type: YTN; PAM sequence: CTG
aagaaatattccggctgcct

SEQ ID NO: 407969 - DNA, 20 bp, Artificial Sequence
  Description of Artificial Sequence: Synthetic oligonucleotide
  Target: LAMA2; (+) strand; PAM type: YTN; PAM sequence: TTC
cggctgcctcaaagatattg

SEQ ID NO: 407970 - DNA, 20 bp, Artificial Sequence
  Description of Artificial Sequence: Synthetic oligonucleotide
  Target: LAMA2; (+) strand; PAM type: YTN; PAM sequence: CTG
cctcaaagatattgaaattt

SEQ ID NO: 407971 - DNA, 20 bp, Artificial Sequence
  Description of Artificial Sequence: Synthetic oligonucleotide
  Target: LAMA2; (+) strand; PAM type: YTN; PAM sequence: CTC
aaagatattgaaatttcaag

SEQ ID NO: 407972 - DNA, 20 bp, Artificial Sequence
  Description of Artificial Sequence: Synthetic oligonucleotide
  Target: LAMA2; (+) strand; PAM type: YTN; PAM sequence: TTG
aaatttcaagaactccgtac

SEQ ID NO: 407973 - DNA, 20 bp, Artificial Sequence
  Description of Artificial Sequence: Synthetic oligonucleotide
  Target: LAMA2; (+) strand; PAM type: YTN; PAM sequence: TTT
caagaactccgtacaatata

SEQ ID NO: 407974 - DNA, 20 bp, Artificial Sequence
  Description of Artificial Sequence: Synthetic oligonucleotide
  Target: LAMA2; (+) strand; PAM type: YTN; PAM sequence: TTC
aagaactccgtacaatatac

SEQ ID NO: 407975 - DNA, 20 bp, Artificial Sequence
  Description of Artificial Sequence: Synthetic oligonucleotide
  Target: LAMA2; (+) strand; PAM type: YTN; PAM sequence: CTC
cgtacaatatactcagtagt

SEQ ID NO: 407976 - DNA, 20 bp, Artificial Sequence
  Description of Artificial Sequence: Synthetic oligonucleotide
  Target: LAMA2; (+) strand; PAM type: YTN; PAM sequence: CTC
agtagtcccgattatgttgg

SEQ ID NO: 407977 - DNA, 20 bp, Artificial Sequence
  Description of Artificial Sequence: Synthetic oligonucleotide
  Target: LAMA2; (+) strand; PAM type: YTN; PAM sequence: TTA
tgttggtgttaccaaaggat

SEQ ID NO: 407978 - DNA, 20 bp, Artificial Sequence
  Description of Artificial Sequence: Synthetic oligonucleotide
  Target: LAMA2; (+) strand; PAM type: YTN; PAM sequence: TTG
gtgttaccaaaggatgttcc

SEQ ID NO: 407979 - DNA, 20 bp, Artificial Sequence
  Description of Artificial Sequence: Synthetic oligonucleotide
  Target: LAMA2; (+) strand; PAM type: YTN; PAM sequence: TTA
ccaaaggatgttccctggag

SEQ ID NO: 407980 - DNA, 20 bp, Artificial Sequence
  Description of Artificial Sequence: Synthetic oligonucleotide
  Target: LAMA2; (+) strand; PAM type: YTN; PAM sequence: TTC
cctggaggttggtctgtttt

SEQ ID NO: 407981 - DNA, 20 bp, Artificial Sequence
  Description of Artificial Sequence: Synthetic oligonucleotide
  Target: LAMA2; (+) strand; PAM type: YTN; PAM sequence: CTG
gaggttggtctgtttttgat

SEQ ID NO: 407982 - DNA, 20 bp, Artificial Sequence
  Description of Artificial Sequence: Synthetic oligonucleotide
  Target: LAMA2; (+) strand; PAM type: YTN; PAM sequence: TTG
gtctgtttttgatagttctc

SEQ ID NO: 407983 - DNA, 20 bp, Artificial Sequence
  Description of Artificial Sequence: Synthetic oligonucleotide
  Target: LAMA2; (+) strand; PAM type: YTN; PAM sequence: CTG
tttttgatagttctctaaac

SEQ ID NO: 407984 - DNA, 20 bp, Artificial Sequence
  Description of Artificial Sequence: Synthetic oligonucleotide
  Target: LAMA2; (+) strand; PAM type: YTN; PAM sequence: TTT
ttgatagttctctaaacaca

SEQ ID NO: 407985 - DNA, 20 bp, Artificial Sequence
  Description of Artificial Sequence: Synthetic oligonucleotide
  Target: LAMA2; (+) strand; PAM type: YTN; PAM sequence: TTT
tgatagttctctaaacacat

SEQ ID NO: 407986 - DNA, 20 bp, Artificial Sequence
  Description of Artificial Sequence: Synthetic oligonucleotide
  Target: LAMA2; (+) strand; PAM type: YTN; PAM sequence: TTT
gatagttctctaaacacatt

SEQ ID NO: 407987 - DNA, 20 bp, Artificial Sequence
  Description of Artificial Sequence: Synthetic oligonucleotide
  Target: LAMA2; (+) strand; PAM type: YTN; PAM sequence: TTG
atagttctctaaacacattt

SEQ ID NO: 407988 - DNA, 20 bp, Artificial Sequence
  Description of Artificial Sequence: Synthetic oligonucleotide
  Target: LAMA2; (+) strand; PAM type: YTN; PAM sequence: TTC
tctaaacacatttatatcag

SEQ ID NO: 407989 - DNA, 20 bp, Artificial Sequence
  Description of Artificial Sequence: Synthetic oligonucleotide
  Target: LAMA2; (+) strand; PAM type: YTN; PAM sequence: CTC
taaacacatttatatcagat

SEQ ID NO: 407990 - DNA, 20 bp, Artificial Sequence
  Description of Artificial Sequence: Synthetic oligonucleotide
  Target: LAMA2; (+) strand; PAM type: YTN; PAM sequence: CTA
aacacatttatatcagattt

SEQ ID NO: 407991 - DNA, 20 bp, Artificial Sequence
  Description of Artificial Sequence: Synthetic oligonucleotide
  Target: LAMA2; (+) strand; PAM type: YTN; PAM sequence: TTT
atatcagatttcacttactt

SEQ ID NO: 407992 - DNA, 20 bp, Artificial Sequence
  Description of Artificial Sequence: Synthetic oligonucleotide
  Target: LAMA2; (+) strand; PAM type: YTN; PAM sequence: TTA
tatcagatttcacttactta

SEQ ID NO: 407993 - DNA, 20 bp, Artificial Sequence
  Description of Artificial Sequence: Synthetic oligonucleotide
  Target: LAMA2; (+) strand; PAM type: YTN; PAM sequence: TTT
cacttacttagtgtggctgc

SEQ ID NO: 407994 - DNA, 20 bp, Artificial Sequence
  Description of Artificial Sequence: Synthetic oligonucleotide
  Target: LAMA2; (+) strand; PAM type: YTN; PAM sequence: TTC
acttacttagtgtggctgct

SEQ ID NO: 407995 - DNA, 20 bp, Artificial Sequence
  Description of Artificial Sequence: Synthetic oligonucleotide
  Target: LAMA2; (+) strand; PAM type: YTN; PAM sequence: CTT
acttagtgtggctgctccta

SEQ ID NO: 407996 - DNA, 20 bp, Artificial Sequence
  Description of Artificial Sequence: Synthetic oligonucleotide
  Target: LAMA2; (+) strand; PAM type: YTN; PAM sequence: TTA
cttagtgtggctgctcctac

SEQ ID NO: 407997 - DNA, 20 bp, Artificial Sequence
  Description of Artificial Sequence: Synthetic oligonucleotide
  Target: LAMA2; (+) strand; PAM type: YTN; PAM sequence: CTT
agtgtggctgctcctacaag

SEQ ID NO: 407998 - DNA, 20 bp, Artificial Sequence
  Description of Artificial Sequence: Synthetic oligonucleotide
  Target: LAMA2; (+) strand; PAM type: YTN; PAM sequence: TTA
gtgtggctgctcctacaagg

SEQ ID NO: 407999 - DNA, 20 bp, Artificial Sequence
  Description of Artificial Sequence: Synthetic oligonucleotide
  Target: LAMA2; (+) strand; PAM type: YTN; PAM sequence: CTG
ctcctacaaggatcagtctt

SEQ ID NO: 408000 - DNA, 20 bp, Artificial Sequence
  Description of Artificial Sequence: Synthetic oligonucleotide
  Target: LAMA2; (+) strand; PAM type: YTN; PAM sequence: CTC
ctacaaggatcagtcttttg

SEQ ID NO: 408001 - DNA, 20 bp, Artificial Sequence
  Description of Artificial Sequence: Synthetic oligonucleotide
  Target: LAMA2; (+) strand; PAM type: YTN; PAM sequence: CTA
caaggatcagtcttttgtta

SEQ ID NO: 408002 - DNA, 20 bp, Artificial Sequence
  Description of Artificial Sequence: Synthetic oligonucleotide
  Target: LAMA2; (+) strand; PAM type: YTN; PAM sequence: CTT
ttgttaatatattttacttt

SEQ ID NO: 408003 - DNA, 20 bp, Artificial Sequence
  Description of Artificial Sequence: Synthetic oligonucleotide
  Target: LAMA2; (+) strand; PAM type: YTN; PAM sequence: TTT
tgttaatatattttactttt

SEQ ID NO: 408004 - DNA, 20 bp, Artificial Sequence
  Description of Artificial Sequence: Synthetic oligonucleotide
  Target: LAMA2; (+) strand; PAM type: YTN; PAM sequence: TTT
gttaatatattttacttttc

SEQ ID NO: 408005 - DNA, 20 bp, Artificial Sequence
  Description of Artificial Sequence: Synthetic oligonucleotide
  Target: LAMA2; (+) strand; PAM type: YTN; PAM sequence: TTG
ttaatatattttacttttct

SEQ ID NO: 408006 - DNA, 20 bp, Artificial Sequence
  Description of Artificial Sequence: Synthetic oligonucleotide
  Target: LAMA2; (+) strand; PAM type: YTN; PAM sequence: TTA
atatattttacttttctact

SEQ ID NO: 408007 - DNA, 20 bp, Artificial Sequence
  Description of Artificial Sequence: Synthetic oligonucleotide
  Target: LAMA2; (+) strand; PAM type: YTN; PAM sequence: TTT
tacttttctactgatcctac

SEQ ID NO: 408008 - DNA, 20 bp, Artificial Sequence
  Description of Artificial Sequence: Synthetic oligonucleotide
  Target: LAMA2; (+) strand; PAM type: YTN; PAM sequence: TTT
acttttctactgatcctact

SEQ ID NO: 408009 - DNA, 20 bp, Artificial Sequence
  Description of Artificial Sequence: Synthetic oligonucleotide
  Target: LAMA2; (+) strand; PAM type: YTN; PAM sequence: TTA
cttttctactgatcctactc

SEQ ID NO: 408010 - DNA, 20 bp, Artificial Sequence
  Description of Artificial Sequence: Synthetic oligonucleotide
  Target: LAMA2; (+) strand; PAM type: YTN; PAM sequence: CTT
ttctactgatcctactctta

SEQ ID NO: 408011 - DNA, 20 bp, Artificial Sequence
  Description of Artificial Sequence: Synthetic oligonucleotide
  Target: LAMA2; (+) strand; PAM type: YTN; PAM sequence: TTT
tctactgatcctactcttaa

SEQ ID NO: 408012 - DNA, 20 bp, Artificial Sequence
  Description of Artificial Sequence: Synthetic oligonucleotide
  Target: LAMA2; (+) strand; PAM type: YTN; PAM sequence: TTT
ctactgatcctactcttaaa

SEQ ID NO: 408013 - DNA, 20 bp, Artificial Sequence
  Description of Artificial Sequence: Synthetic oligonucleotide
  Target: LAMA2; (+) strand; PAM type: YTN; PAM sequence: TTC
tactgatcctactcttaaac

SEQ ID NO: 408014 - DNA, 20 bp, Artificial Sequence
  Description of Artificial Sequence: Synthetic oligonucleotide
  Target: LAMA2; (+) strand; PAM type: YTN; PAM sequence: CTA
ctgatcctactcttaaacga

SEQ ID NO: 408015 - DNA, 20 bp, Artificial Sequence
  Description of Artificial Sequence: Synthetic oligonucleotide
  Target: LAMA2; (+) strand; PAM type: YTN; PAM sequence: CTG
atcctactcttaaacgataa

SEQ ID NO: 408016 - DNA, 20 bp, Artificial Sequence
  Description of Artificial Sequence: Synthetic oligonucleotide
  Target: LAMA2; (+) strand; PAM type: YTN; PAM sequence: CTA
ctcttaaacgataaagcaag

SEQ ID NO: 408017 - DNA, 20 bp, Artificial Sequence
  Description of Artificial Sequence: Synthetic oligonucleotide
  Target: LAMA2; (+) strand; PAM type: YTN; PAM sequence: CTC
ttaaacgataaagcaagatt

SEQ ID NO: 408018 - DNA, 20 bp, Artificial Sequence
  Description of Artificial Sequence: Synthetic oligonucleotide
  Target: LAMA2; (+) strand; PAM type: YTN; PAM sequence: CTT
aaacgataaagcaagattaa

SEQ ID NO: 408019 - DNA, 20 bp, Artificial Sequence
  Description of Artificial Sequence: Synthetic oligonucleotide
  Target: LAMA2; (+) strand; PAM type: YTN; PAM sequence: TTA
aacgataaagcaagattaaa

SEQ ID NO: 408020 - DNA, 20 bp, Artificial Sequence
  Description of Artificial Sequence: Synthetic oligonucleotide
  Target: LAMA2; (+) strand; PAM type: YTN; PAM sequence: TTA
aagcattctctaaattacca

SEQ ID NO: 408021 - DNA, 20 bp, Artificial Sequence
  Description of Artificial Sequence: Synthetic oligonucleotide
  Target: LAMA2; (+) strand; PAM type: YTN; PAM sequence: TTC
tctaaattaccatgataaaa

SEQ ID NO: 408022 - DNA, 20 bp, Artificial Sequence
  Description of Artificial Sequence: Synthetic oligonucleotide
  Target: LAMA2; (+) strand; PAM type: YTN; PAM sequence: CTC
taaattaccatgataaaaaa

SEQ ID NO: 408023 - DNA, 20 bp, Artificial Sequence
  Description of Artificial Sequence: Synthetic oligonucleotide
  Target: LAMA2; (+) strand; PAM type: YTN; PAM sequence: CTA
aattaccatgataaaaaatg

SEQ ID NO: 408024 - DNA, 20 bp, Artificial Sequence
  Description of Artificial Sequence: Synthetic oligonucleotide
  Target: LAMA2; (+) strand; PAM type: YTN; PAM sequence: TTA
ccatgataaaaaatggtatt

SEQ ID NO: 408025 - DNA, 20 bp, Artificial Sequence
  Description of Artificial Sequence: Synthetic oligonucleotide
  Target: LAMA2; (+) strand; PAM type: YTN; PAM sequence: TTA
tgaagtcctagaattgtgat

SEQ ID NO: 408026 - DNA, 20 bp, Artificial Sequence
  Description of Artificial Sequence: Synthetic oligonucleotide
  Target: LAMA2; (+) strand; PAM type: YTN; PAM sequence: CTA
gaattgtgatccaattttcc

SEQ ID NO: 408027 - DNA, 20 bp, Artificial Sequence
  Description of Artificial Sequence: Synthetic oligonucleotide
  Target: LAMA2; (+) strand; PAM type: YTN; PAM sequence: TTG
tgatccaattttccaaatgt

SEQ ID NO: 408028 - DNA, 20 bp, Artificial Sequence
  Description of Artificial Sequence: Synthetic oligonucleotide
  Target: LAMA2; (+) strand; PAM type: YTN; PAM sequence: TTT
tccaaatgtatagctcttta

SEQ ID NO: 408029 - DNA, 20 bp, Artificial Sequence
  Description of Artificial Sequence: Synthetic oligonucleotide
  Target: LAMA2; (+) strand; PAM type: YTN; PAM sequence: TTT
ccaaatgtatagctctttat

SEQ ID NO: 408030 - DNA, 20 bp, Artificial Sequence
  Description of Artificial Sequence: Synthetic oligonucleotide
  Target: LAMA2; (+) strand; PAM type: YTN; PAM sequence: TTC
caaatgtatagctctttata

SEQ ID NO: 408031 - DNA, 20 bp, Artificial Sequence
  Description of Artificial Sequence: Synthetic oligonucleotide
  Target: LAMA2; (+) strand; PAM type: YTN; PAM sequence: CTC
tttatagcacatatcattaa

SEQ ID NO: 408032 - DNA, 20 bp, Artificial Sequence
  Description of Artificial Sequence: Synthetic oligonucleotide
  Target: LAMA2; (+) strand; PAM type: YTN; PAM sequence: CTT
tatagcacatatcattaata

SEQ ID NO: 408033 - DNA, 20 bp, Artificial Sequence
  Description of Artificial Sequence: Synthetic oligonucleotide
  Target: LAMA2; (+) strand; PAM type: YTN; PAM sequence: TTT
atagcacatatcattaatac

SEQ ID NO: 408034 - DNA, 20 bp, Artificial Sequence
  Description of Artificial Sequence: Synthetic oligonucleotide
  Target: LAMA2; (+) strand; PAM type: YTN; PAM sequence: TTA
tagcacatatcattaatact

SEQ ID NO: 408035 - DNA, 20 bp, Artificial Sequence
  Description of Artificial Sequence: Synthetic oligonucleotide
  Target: LAMA2; (+) strand; PAM type: YTN; PAM sequence: TTA
atactaatctcttttctgtt

SEQ ID NO: 408036 - DNA, 20 bp, Artificial Sequence
  Description of Artificial Sequence: Synthetic oligonucleotide
  Target: LAMA2; (+) strand; PAM type: YTN; PAM sequence: CTA
atctcttttctgtttttctc

SEQ ID NO: 408037 - DNA, 20 bp, Artificial Sequence
  Description of Artificial Sequence: Synthetic oligonucleotide
  Target: LAMA2; (+) strand; PAM type: YTN; PAM sequence: CTC
ttttctgtttttctcttttt

SEQ ID NO: 408038 - DNA, 20 bp, Artificial Sequence
  Description of Artificial Sequence: Synthetic oligonucleotide
  Target: LAMA2; (+) strand; PAM type: YTN; PAM sequence: CTT
ttctgtttttctcttttttt

SEQ ID NO: 408039 - DNA, 20 bp, Artificial Sequence
  Description of Artificial Sequence: Synthetic oligonucleotide
  Target: LAMA2; (+) strand; PAM type: YTN; PAM sequence: TTT
tctgtttttctctttttttc

SEQ ID NO: 408040 - DNA, 20 bp, Artificial Sequence
  Description of Artificial Sequence: Synthetic oligonucleotide
  Target: LAMA2; (+) strand; PAM type: YTN; PAM sequence: TTT
ctgtttttctctttttttcc

SEQ ID NO: 408041 - DNA, 20 bp, Artificial Sequence
  Description of Artificial Sequence: Synthetic oligonucleotide
  Target: LAMA2; (+) strand; PAM type: YTN; PAM sequence: TTC
tgtttttctctttttttcca

SEQ ID NO: 408042 - DNA, 20 bp, Artificial Sequence
  Description of Artificial Sequence: Synthetic oligonucleotide
  Target: LAMA2; (+) strand; PAM type: YTN; PAM sequence: CTG
tttttctctttttttccaac

SEQ ID NO: 408043 - DNA, 20 bp, Artificial Sequence
  Description of Artificial Sequence: Synthetic oligonucleotide
  Target: LAMA2; (+) strand; PAM type: YTN; PAM sequence: TTT
ttctctttttttccaacact

SEQ ID NO: 408044 - DNA, 20 bp, Artificial Sequence
  Description of Artificial Sequence: Synthetic oligonucleotide
  Target: LAMA2; (+) strand; PAM type: YTN; PAM sequence: TTT
tctctttttttccaacacta

SEQ ID NO: 408045 - DNA, 20 bp, Artificial Sequence
  Description of Artificial Sequence: Synthetic oligonucleotide
  Target: LAMA2; (+) strand; PAM type: YTN; PAM sequence: TTT
ctctttttttccaacactac

SEQ ID NO: 408046 - DNA, 20 bp, Artificial Sequence
  Description of Artificial Sequence: Synthetic oligonucleotide
  Target: LAMA2; (+) strand; PAM type: YTN; PAM sequence: TTC
tctttttttccaacactact

SEQ ID NO: 408047 - DNA, 20 bp, Artificial Sequence
  Description of Artificial Sequence: Synthetic oligonucleotide
  Target: LAMA2; (+) strand; PAM type: YTN; PAM sequence: CTC
tttttttccaacactacttt

SEQ ID NO: 408048 - DNA, 20 bp, Artificial Sequence
  Description of Artificial Sequence: Synthetic oligonucleotide
  Target: LAMA2; (+) strand; PAM type: YTN; PAM sequence: CTT
tttttccaacactacttttc

SEQ ID NO: 408049 - DNA, 20 bp, Artificial Sequence
  Description of Artificial Sequence: Synthetic oligonucleotide
  Target: LAMA2; (+) strand; PAM type: YTN; PAM sequence: TTT
ttttccaacactacttttcc

SEQ ID NO: 408050 - DNA, 20 bp, Artificial Sequence
  Description of Artificial Sequence: Synthetic oligonucleotide
  Target: LAMA2; (+) strand; PAM type: YTN; PAM sequence: TTT
tttccaacactacttttccc

SEQ ID NO: 408051 - DNA, 20 bp, Artificial Sequence
  Description of Artificial Sequence: Synthetic oligonucleotide
  Target: LAMA2; (+) strand; PAM type: YTN; PAM sequence: TTT
ttccaacactacttttccct

SEQ ID NO: 408052 - DNA, 20 bp, Artificial Sequence
  Description of Artificial Sequence: Synthetic oligonucleotide
  Target: LAMA2; (+) strand; PAM type: YTN; PAM sequence: TTT
tccaacactacttttccctt

SEQ ID NO: 408053 - DNA, 20 bp, Artificial Sequence
  Description of Artificial Sequence: Synthetic oligonucleotide
  Target: LAMA2; (+) strand; PAM type: YTN; PAM sequence: TTT
ccaacactacttttcccttt

SEQ ID NO: 408054 - DNA, 20 bp, Artificial Sequence
  Description of Artificial Sequence: Synthetic oligonucleotide
  Target: LAMA2; (+) strand; PAM type: YTN; PAM sequence: TTC
caacactacttttccctttt

SEQ ID NO: 408055 - DNA, 20 bp, Artificial Sequence
  Description of Artificial Sequence: Synthetic oligonucleotide
  Target: LAMA2; (+) strand; PAM type: YTN; PAM sequence: CTA
cttttcccttttccttattt

SEQ ID NO: 408056 - DNA, 20 bp, Artificial Sequence
  Description of Artificial Sequence: Synthetic oligonucleotide
  Target: LAMA2; (+) strand; PAM type: YTN; PAM sequence: CTT
ttcccttttccttatttttg

SEQ ID NO: 408057 - DNA, 20 bp, Artificial Sequence
  Description of Artificial Sequence: Synthetic oligonucleotide
  Target: LAMA2; (+) strand; PAM type: YTN; PAM sequence: TTT
tcccttttccttatttttgt

SEQ ID NO: 408058 - DNA, 20 bp, Artificial Sequence
  Description of Artificial Sequence: Synthetic oligonucleotide
  Target: LAMA2; (+) strand; PAM type: YTN; PAM sequence: TTT
cccttttccttatttttgtc

SEQ ID NO: 408059 - DNA, 20 bp, Artificial Sequence
  Description of Artificial Sequence: Synthetic oligonucleotide
  Target: LAMA2; (+) strand; PAM type: YTN; PAM sequence: TTC
ccttttccttatttttgtca

SEQ ID NO: 408060 - DNA, 20 bp, Artificial Sequence
  Description of Artificial Sequence: Synthetic oligonucleotide
  Target: LAMA2; (+) strand; PAM type: YTN; PAM sequence: CTT
ttccttatttttgtcatcca

SEQ ID NO: 408061 - DNA, 20 bp, Artificial Sequence
  Description of Artificial Sequence: Synthetic oligonucleotide
  Target: LAMA2; (+) strand; PAM type: YTN; PAM sequence: TTT
tccttatttttgtcatccat

SEQ ID NO: 408062 - DNA, 20 bp, Artificial Sequence
  Description of Artificial Sequence: Synthetic oligonucleotide
  Target: LAMA2; (+) strand; PAM type: YTN; PAM sequence: TTT
ccttatttttgtcatccatt

SEQ ID NO: 408063 - DNA, 20 bp, Artificial Sequence
  Description of Artificial Sequence: Synthetic oligonucleotide
  Target: LAMA2; (+) strand; PAM type: YTN; PAM sequence: TTC
cttatttttgtcatccattt

SEQ ID NO: 408064 - DNA, 20 bp, Artificial Sequence
  Description of Artificial Sequence: Synthetic oligonucleotide
  Target: LAMA2; (+) strand; PAM type: YTN; PAM sequence: CTT
atttttgtcatccattttaa

SEQ ID NO: 408065 - DNA, 20 bp, Artificial Sequence
  Description of Artificial Sequence: Synthetic oligonucleotide
  Target: LAMA2; (+) strand; PAM type: YTN; PAM sequence: TTA
tttttgtcatccattttaaa

SEQ ID NO: 408066 - DNA, 20 bp, Artificial Sequence
  Description of Artificial Sequence: Synthetic oligonucleotide
  Target: LAMA2; (+) strand; PAM type: YTN; PAM sequence: TTT
ttgtcatccattttaaattt

SEQ ID NO: 408067 - DNA, 20 bp, Artificial Sequence
  Description of Artificial Sequence: Synthetic oligonucleotide
  Target: LAMA2; (+) strand; PAM type: YTN; PAM sequence: TTT
tgtcatccattttaaattta

SEQ ID NO: 408068 - DNA, 20 bp, Artificial Sequence
  Description of Artificial Sequence: Synthetic oligonucleotide
  Target: LAMA2; (+) strand; PAM type: YTN; PAM sequence: TTT
gtcatccattttaaatttat

SEQ ID NO: 408069 - DNA, 20 bp, Artificial Sequence
  Description of Artificial Sequence: Synthetic oligonucleotide
  Target: LAMA2; (+) strand; PAM type: YTN; PAM sequence: TTG
tcatccattttaaatttatt

SEQ ID NO: 408070 - DNA, 20 bp, Artificial Sequence
  Description of Artificial Sequence: Synthetic oligonucleotide
  Target: LAMA2; (+) strand; PAM type: YTN; PAM sequence: TTT
taaatttattttacttttat

SEQ ID NO: 408071 - DNA, 20 bp, Artificial Sequence
  Description of Artificial Sequence: Synthetic oligonucleotide
  Target: LAMA2; (+) strand; PAM type: YTN; PAM sequence: TTT
aaatttattttacttttatg

SEQ ID NO: 408072 - DNA, 20 bp, Artificial Sequence
  Description of Artificial Sequence: Synthetic oligonucleotide
  Target: LAMA2; (+) strand; PAM type: YTN; PAM sequence: TTA
aatttattttacttttatgt

SEQ ID NO: 408073 - DNA, 20 bp, Artificial Sequence
  Description of Artificial Sequence: Synthetic oligonucleotide
  Target: LAMA2; (+) strand; PAM type: YTN; PAM sequence: TTT
attttacttttatgtgttgt

SEQ ID NO: 408074 - DNA, 20 bp, Artificial Sequence
  Description of Artificial Sequence: Synthetic oligonucleotide
  Target: LAMA2; (+) strand; PAM type: YTN; PAM sequence: TTA
ttttacttttatgtgttgta

SEQ ID NO: 408075 - DNA, 20 bp, Artificial Sequence
  Description of Artificial Sequence: Synthetic oligonucleotide
  Target: LAMA2; (+) strand; PAM type: YTN; PAM sequence: TTT
tacttttatgtgttgtatat

SEQ ID NO: 408076 - DNA, 20 bp, Artificial Sequence
  Description of Artificial Sequence: Synthetic oligonucleotide
  Target: LAMA2; (+) strand; PAM type: YTN; PAM sequence: TTT
acttttatgtgttgtatata

SEQ ID NO: 408077 - DNA, 20 bp, Artificial Sequence
  Description of Artificial Sequence: Synthetic oligonucleotide
  Target: LAMA2; (+) strand; PAM type: YTN; PAM sequence: TTA
cttttatgtgttgtatatag

SEQ ID NO: 408078 - DNA, 20 bp, Artificial Sequence
  Description of Artificial Sequence: Synthetic oligonucleotide
  Target: LAMA2; (+) strand; PAM type: YTN; PAM sequence: CTT
ttatgtgttgtatatagctt

SEQ ID NO: 408079 - DNA, 20 bp, Artificial Sequence
  Description of Artificial Sequence: Synthetic oligonucleotide
  Target: LAMA2; (+) strand; PAM type: YTN; PAM sequence: TTT
tatgtgttgtatatagcttt

SEQ ID NO: 408080 - DNA, 20 bp, Artificial Sequence
  Description of Artificial Sequence: Synthetic oligonucleotide
  Target: LAMA2; (+) strand; PAM type: YTN; PAM sequence: TTT
atgtgttgtatatagcttta

SEQ ID NO: 408081 - DNA, 20 bp, Artificial Sequence
  Description of Artificial Sequence: Synthetic oligonucleotide
  Target: LAMA2; (+) strand; PAM type: YTN; PAM sequence: TTA
tgtgttgtatatagctttat

SEQ ID NO: 408082 - DNA, 20 bp, Artificial Sequence
  Description of Artificial Sequence: Synthetic oligonucleotide
  Target: LAMA2; (+) strand; PAM type: YTN; PAM sequence: TTG
tatatagctttattagcaac

SEQ ID NO: 408083 - DNA, 20 bp, Artificial Sequence
  Description of Artificial Sequence: Synthetic oligonucleotide
  Target: LAMA2; (+) strand; PAM type: YTN; PAM sequence: CTT
tattagcaaccttacatttt

SEQ ID NO: 408084 - DNA, 20 bp, Artificial Sequence
  Description of Artificial Sequence: Synthetic oligonucleotide
  Target: LAMA2; (+) strand; PAM type: YTN; PAM sequence: TTT
attagcaaccttacattttt

SEQ ID NO: 408085 - DNA, 20 bp, Artificial Sequence
  Description of Artificial Sequence: Synthetic oligonucleotide
  Target: LAMA2; (+) strand; PAM type: YTN; PAM sequence: TTA
ttagcaaccttacatttttt

SEQ ID NO: 408086 - DNA, 20 bp, Artificial Sequence
  Description of Artificial Sequence: Synthetic oligonucleotide
  Target: LAMA2; (+) strand; PAM type: YTN; PAM sequence: TTA
gcaaccttacattttttctg

SEQ ID NO: 408087 - DNA, 20 bp, Artificial Sequence
  Description of Artificial Sequence: Synthetic oligonucleotide
  Target: LAMA2; (+) strand; PAM type: YTN; PAM sequence: CTT
acattttttctggaaccatt

SEQ ID NO: 408088 - DNA, 20 bp, Artificial Sequence
  Description of Artificial Sequence: Synthetic oligonucleotide
  Target: LAMA2; (+) strand; PAM type: YTN; PAM sequence: TTA
cattttttctggaaccattg

SEQ ID NO: 408089 - DNA, 20 bp, Artificial Sequence
  Description of Artificial Sequence: Synthetic oligonucleotide
  Target: LAMA2; (+) strand; PAM type: YTN; PAM sequence: TTT
tttctggaaccattgaagtt

SEQ ID NO: 408090 - DNA, 20 bp, Artificial Sequence
  Description of Artificial Sequence: Synthetic oligonucleotide
  Target: LAMA2; (+) strand; PAM type: YTN; PAM sequence: TTT
ttctggaaccattgaagttt

SEQ ID NO: 408091 - DNA, 20 bp, Artificial Sequence
  Description of Artificial Sequence: Synthetic oligonucleotide
  Target: LAMA2; (+) strand; PAM type: YTN; PAM sequence: TTT
tctggaaccattgaagttta

SEQ ID NO: 408092 - DNA, 20 bp, Artificial Sequence
  Description of Artificial Sequence: Synthetic oligonucleotide
  Target: LAMA2; (+) strand; PAM type: YTN; PAM sequence: TTT
ctggaaccattgaagtttac

SEQ ID NO: 408093 - DNA, 20 bp, Artificial Sequence
  Description of Artificial Sequence: Synthetic oligonucleotide
  Target: LAMA2; (+) strand; PAM type: YTN; PAM sequence: TTC
tggaaccattgaagtttaca

SEQ ID NO: 408094 - DNA, 20 bp, Artificial Sequence
  Description of Artificial Sequence: Synthetic oligonucleotide
  Target: LAMA2; (+) strand; PAM type: YTN; PAM sequence: CTG
gaaccattgaagtttacaca

SEQ ID NO: 408095 - DNA, 20 bp, Artificial Sequence
  Description of Artificial Sequence: Synthetic oligonucleotide
  Target: LAMA2; (+) strand; PAM type: YTN; PAM sequence: TTG
aagtttacacaagtagcaag

SEQ ID NO: 408096 - DNA, 20 bp, Artificial Sequence
  Description of Artificial Sequence: Synthetic oligonucleotide
  Target: LAMA2; (+) strand; PAM type: YTN; PAM sequence: TTT
acacaagtagcaagtagtaa

SEQ ID NO: 408097 - DNA, 20 bp, Artificial Sequence
  Description of Artificial Sequence: Synthetic oligonucleotide
  Target: LAMA2; (+) strand; PAM type: YTN; PAM sequence: TTA
cacaagtagcaagtagtaat

SEQ ID NO: 408098 - DNA, 20 bp, Artificial Sequence
  Description of Artificial Sequence: Synthetic oligonucleotide
  Target: LAMA2; (+) strand; PAM type: YTN; PAM sequence: TTT
acaccgtagccattagtgca

SEQ ID NO: 408099 - DNA, 20 bp, Artificial Sequence
  Description of Artificial Sequence: Synthetic oligonucleotide
  Target: LAMA2; (+) strand; PAM type: YTN; PAM sequence: TTA
caccgtagccattagtgcat

SEQ ID NO: 408100 - DNA, 20 bp, Artificial Sequence
  Description of Artificial Sequence: Synthetic oligonucleotide
  Target: LAMA2; (+) strand; PAM type: YTN; PAM sequence: TTA
gtgcatagtctgttgtctac

SEQ ID NO: 408101 - DNA, 20 bp, Artificial Sequence
  Description of Artificial Sequence: Synthetic oligonucleotide
  Target: LAMA2; (+) strand; PAM type: YTN; PAM sequence: CTG
ttgtctacaaacttgaagtc

SEQ ID NO: 408102 - DNA, 20 bp, Artificial Sequence
  Description of Artificial Sequence: Synthetic oligonucleotide
  Target: LAMA2; (+) strand; PAM type: YTN; PAM sequence: TTG
tctacaaacttgaagtctag

SEQ ID NO: 408103 - DNA, 20 bp, Artificial Sequence
  Description of Artificial Sequence: Synthetic oligonucleotide
  Target: LAMA2; (+) strand; PAM type: YTN; PAM sequence: CTA
caaacttgaagtctagcccc

SEQ ID NO: 408104 - DNA, 20 bp, Artificial Sequence
  Description of Artificial Sequence: Synthetic oligonucleotide
  Target: LAMA2; (+) strand; PAM type: YTN; PAM sequence: CTT
gaagtctagcccccttgtct

SEQ ID NO: 408105 - DNA, 20 bp, Artificial Sequence
  Description of Artificial Sequence: Synthetic oligonucleotide
  Target: LAMA2; (+) strand; PAM type: YTN; PAM sequence: TTG
aagtctagcccccttgtctt

SEQ ID NO: 408106 - DNA, 20 bp, Artificial Sequence
  Description of Artificial Sequence: Synthetic oligonucleotide
  Target: LAMA2; (+) strand; PAM type: YTN; PAM sequence: CTA
gcccccttgtctttgaaata

SEQ ID NO: 408107 - DNA, 20 bp, Artificial Sequence
  Description of Artificial Sequence: Synthetic oligonucleotide
  Target: LAMA2; (+) strand; PAM type: YTN; PAM sequence: CTT
gtctttgaaataacatagac

SEQ ID NO: 408108 - DNA, 20 bp, Artificial Sequence
  Description of Artificial Sequence: Synthetic oligonucleotide
  Target: LAMA2; (+) strand; PAM type: YTN; PAM sequence: TTG
tctttgaaataacatagact

SEQ ID NO: 408109 - DNA, 20 bp, Artificial Sequence
  Description of Artificial Sequence: Synthetic oligonucleotide
  Target: LAMA2; (+) strand; PAM type: YTN; PAM sequence: CTT
tgaaataacatagactggga

SEQ ID NO: 408110 - DNA, 20 bp, Artificial Sequence
  Description of Artificial Sequence: Synthetic oligonucleotide
  Target: LAMA2; (+) strand; PAM type: YTN; PAM sequence: TTT
gaaataacatagactgggac

SEQ ID NO: 408111 - DNA, 20 bp, Artificial Sequence
  Description of Artificial Sequence: Synthetic oligonucleotide
  Target: LAMA2; (+) strand; PAM type: YTN; PAM sequence: TTG
aaataacatagactgggacc

SEQ ID NO: 408112 - DNA, 20 bp, Artificial Sequence
  Description of Artificial Sequence: Synthetic oligonucleotide
  Target: LAMA2; (+) strand; PAM type: YTN; PAM sequence: CTG
ggacctgtggcaatcaactc

SEQ ID NO: 408113 - DNA, 20 bp, Artificial Sequence
  Description of Artificial Sequence: Synthetic oligonucleotide
  Target: LAMA2; (+) strand; PAM type: YTN; PAM sequence: CTG
tggcaatcaactctgcaaag

SEQ ID NO: 408114 - DNA, 20 bp, Artificial Sequence
  Description of Artificial Sequence: Synthetic oligonucleotide
  Target: LAMA2; (+) strand; PAM type: YTN; PAM sequence: CTC
tgcaaagacttgtgtttgac

SEQ ID NO: 408115 - DNA, 20 bp, Artificial Sequence
  Description of Artificial Sequence: Synthetic oligonucleotide
  Target: LAMA2; (+) strand; PAM type: YTN; PAM sequence: CTG
caaagacttgtgtttgacat

SEQ ID NO: 408116 - DNA, 20 bp, Artificial Sequence
  Description of Artificial Sequence: Synthetic oligonucleotide
  Target: LAMA2; (+) strand; PAM type: YTN; PAM sequence: CTT
gtgtttgacatgcctgcaaa

SEQ ID NO: 408117 - DNA, 20 bp, Artificial Sequence
  Description of Artificial Sequence: Synthetic oligonucleotide
  Target: LAMA2; (+) strand; PAM type: YTN; PAM sequence: TTG
tgtttgacatgcctgcaaag

SEQ ID NO: 408118 - DNA, 20 bp, Artificial Sequence
  Description of Artificial Sequence: Synthetic oligonucleotide
  Target: LAMA2; (+) strand; PAM type: YTN; PAM sequence: TTT
gacatgcctgcaaagtcctt

SEQ ID NO: 408119 - DNA, 20 bp, Artificial Sequence
  Description of Artificial Sequence: Synthetic oligonucleotide
  Target: LAMA2; (+) strand; PAM type: YTN; PAM sequence: TTG
acatgcctgcaaagtccttt

SEQ ID NO: 408120 - DNA, 20 bp, Artificial Sequence
  Description of Artificial Sequence: Synthetic oligonucleotide
  Target: LAMA2; (+) strand; PAM type: YTN; PAM sequence: CTG
caaagtcctttgttagctga

SEQ ID NO: 408121 - DNA, 20 bp, Artificial Sequence
  Description of Artificial Sequence: Synthetic oligonucleotide
  Target: LAMA2; (+) strand; PAM type: YTN; PAM sequence: CTT
tgttagctgatatcctcagt

SEQ ID NO: 408122 - DNA, 20 bp, Artificial Sequence
  Description of Artificial Sequence: Synthetic oligonucleotide
  Target: LAMA2; (+) strand; PAM type: YTN; PAM sequence: TTT
gttagctgatatcctcagta

SEQ ID NO: 408123 - DNA, 20 bp, Artificial Sequence
  Description of Artificial Sequence: Synthetic oligonucleotide
  Target: LAMA2; (+) strand; PAM type: YTN; PAM sequence: TTG
ttagctgatatcctcagtaa

SEQ ID NO: 408124 - DNA, 20 bp, Artificial Sequence
  Description of Artificial Sequence: Synthetic oligonucleotide
  Target: LAMA2; (+) strand; PAM type: YTN; PAM sequence: TTA
gctgatatcctcagtaactc

SEQ ID NO: 408125 - DNA, 20 bp, Artificial Sequence
  Description of Artificial Sequence: Synthetic oligonucleotide
  Target: LAMA2; (+) strand; PAM type: YTN; PAM sequence: CTG
atatcctcagtaactcttct

SEQ ID NO: 408126 - DNA, 20 bp, Artificial Sequence
  Description of Artificial Sequence: Synthetic oligonucleotide
  Target: LAMA2; (+) strand; PAM type: YTN; PAM sequence: CTC
agtaactcttctttgatgct

SEQ ID NO: 408127 - DNA, 20 bp, Artificial Sequence
  Description of Artificial Sequence: Synthetic oligonucleotide
  Target: LAMA2; (+) strand; PAM type: YTN; PAM sequence: CTC
ttctttgatgctaaagcatc

SEQ ID NO: 408128 - DNA, 20 bp, Artificial Sequence
  Description of Artificial Sequence: Synthetic oligonucleotide
  Target: LAMA2; (+) strand; PAM type: YTN; PAM sequence: CTT
ctttgatgctaaagcatcct

SEQ ID NO: 408129 - DNA, 20 bp, Artificial Sequence
  Description of Artificial Sequence: Synthetic oligonucleotide
  Target: LAMA2; (+) strand; PAM type: YTN; PAM sequence: TTC
tttgatgctaaagcatccta

SEQ ID NO: 408130 - DNA, 20 bp, Artificial Sequence
  Description of Artificial Sequence: Synthetic oligonucleotide
  Target: LAMA2; (+) strand; PAM type: YTN; PAM sequence: CTT
tgatgctaaagcatcctagc

SEQ ID NO: 408131 - DNA, 20 bp, Artificial Sequence
  Description of Artificial Sequence: Synthetic oligonucleotide
  Target: LAMA2; (+) strand; PAM type: YTN; PAM sequence: TTT
gatgctaaagcatcctagca

SEQ ID NO: 408132 - DNA, 20 bp, Artificial Sequence
  Description of Artificial Sequence: Synthetic oligonucleotide
  Target: LAMA2; (+) strand; PAM type: YTN; PAM sequence: TTG
atgctaaagcatcctagcat

SEQ ID NO: 408133 - DNA, 20 bp, Artificial Sequence
  Description of Artificial Sequence: Synthetic oligonucleotide
  Target: LAMA2; (+) strand; PAM type: YTN; PAM sequence: CTA
aagcatcctagcattcccct

SEQ ID NO: 408134 - DNA, 20 bp, Artificial Sequence
  Description of Artificial Sequence: Synthetic oligonucleotide
  Target: LAMA2; (+) strand; PAM type: YTN; PAM sequence: CTA
gcattcccctattttcgttt

SEQ ID NO: 408135 - DNA, 20 bp, Artificial Sequence
  Description of Artificial Sequence: Synthetic oligonucleotide
  Target: LAMA2; (+) strand; PAM type: YTN; PAM sequence: TTC
ccctattttcgtttaactat

SEQ ID NO: 408136 - DNA, 20 bp, Artificial Sequence
  Description of Artificial Sequence: Synthetic oligonucleotide
  Target: LAMA2; (+) strand; PAM type: YTN; PAM sequence: CTA
ttttcgtttaactattttgc

SEQ ID NO: 408137 - DNA, 20 bp, Artificial Sequence
  Description of Artificial Sequence: Synthetic oligonucleotide
  Target: LAMA2; (+) strand; PAM type: YTN; PAM sequence: TTT
tcgtttaactattttgcact

SEQ ID NO: 408138 - DNA, 20 bp, Artificial Sequence
  Description of Artificial Sequence: Synthetic oligonucleotide
  Target: LAMA2; (+) strand; PAM type: YTN; PAM sequence: TTT
cgtttaactattttgcactg

SEQ ID NO: 408139 - DNA, 20 bp, Artificial Sequence
  Description of Artificial Sequence: Synthetic oligonucleotide
  Target: LAMA2; (+) strand; PAM type: YTN; PAM sequence: TTC
gtttaactattttgcactgt

SEQ ID NO: 408140 - DNA, 20 bp, Artificial Sequence
  Description of Artificial Sequence: Synthetic oligonucleotide
  Target: LAMA2; (+) strand; PAM type: YTN; PAM sequence: TTT
aactattttgcactgtttct

SEQ ID NO: 408141 - DNA, 20 bp, Artificial Sequence
  Description of Artificial Sequence: Synthetic oligonucleotide
  Target: LAMA2; (+) strand; PAM type: YTN; PAM sequence: TTA
actattttgcactgtttctt

SEQ ID NO: 408142 - DNA, 20 bp, Artificial Sequence
  Description of Artificial Sequence: Synthetic oligonucleotide
  Target: LAMA2; (+) strand; PAM type: YTN; PAM sequence: CTA
ttttgcactgtttcttcagt

SEQ ID NO: 408143 - DNA, 20 bp, Artificial Sequence
  Description of Artificial Sequence: Synthetic oligonucleotide
  Target: LAMA2; (+) strand; PAM type: YTN; PAM sequence: TTT
tgcactgtttcttcagttga

SEQ ID NO: 408144 - DNA, 20 bp, Artificial Sequence
  Description of Artificial Sequence: Synthetic oligonucleotide
  Target: LAMA2; (+) strand; PAM type: YTN; PAM sequence: TTT
gcactgtttcttcagttgac

SEQ ID NO: 408145 - DNA, 20 bp, Artificial Sequence
  Description of Artificial Sequence: Synthetic oligonucleotide
  Target: LAMA2; (+) strand; PAM type: YTN; PAM sequence: TTG
cactgtttcttcagttgaca

SEQ ID NO: 408146 - DNA, 20 bp, Artificial Sequence
  Description of Artificial Sequence: Synthetic oligonucleotide
  Target: LAMA2; (+) strand; PAM type: YTN; PAM sequence: CTG
tttcttcagttgacactgac

SEQ ID NO: 408147 - DNA, 20 bp, Artificial Sequence
  Description of Artificial Sequence: Synthetic oligonucleotide
  Target: LAMA2; (+) strand; PAM type: YTN; PAM sequence: TTT
cttcagttgacactgaccca

SEQ ID NO: 408148 - DNA, 20 bp, Artificial Sequence
  Description of Artificial Sequence: Synthetic oligonucleotide
  Target: LAMA2; (+) strand; PAM type: YTN; PAM sequence: TTC
ttcagttgacactgacccat

SEQ ID NO: 408149 - DNA, 20 bp, Artificial Sequence
  Description of Artificial Sequence: Synthetic oligonucleotide
  Target: LAMA2; (+) strand; PAM type: YTN; PAM sequence: CTT
cagttgacactgacccatat

SEQ ID NO: 408150 - DNA, 20 bp, Artificial Sequence
  Description of Artificial Sequence: Synthetic oligonucleotide
  Target: LAMA2; (+) strand; PAM type: YTN; PAM sequence: TTC
agttgacactgacccatatg

SEQ ID NO: 408151 - DNA, 20 bp, Artificial Sequence
  Description of Artificial Sequence: Synthetic oligonucleotide
  Target: LAMA2; (+) strand; PAM type: YTN; PAM sequence: TTG
acactgacccatatgtgaga

SEQ ID NO: 408152 - DNA, 20 bp, Artificial Sequence
  Description of Artificial Sequence: Synthetic oligonucleotide
  Target: LAMA2; (+) strand; PAM type: YTN; PAM sequence: CTG
acccatatgtgagaaagacc

SEQ ID NO: 408153 - DNA, 20 bp, Artificial Sequence
  Description of Artificial Sequence: Synthetic oligonucleotide
  Target: LAMA2; (+) strand; PAM type: YTN; PAM sequence: CTC
tactctcttaaaatatccat

SEQ ID NO: 408154 - DNA, 20 bp, Artificial Sequence
  Description of Artificial Sequence: Synthetic oligonucleotide
  Target: LAMA2; (+) strand; PAM type: YTN; PAM sequence: CTA
ctctcttaaaatatccataa

SEQ ID NO: 408155 - DNA, 20 bp, Artificial Sequence
  Description of Artificial Sequence: Synthetic oligonucleotide
  Target: LAMA2; (+) strand; PAM type: YTN; PAM sequence: CTC
tcttaaaatatccataagca

SEQ ID NO: 408156 - DNA, 20 bp, Artificial Sequence
  Description of Artificial Sequence: Synthetic oligonucleotide
  Target: LAMA2; (+) strand; PAM type: YTN; PAM sequence: CTC
ttaaaatatccataagcaag

SEQ ID NO: 408157 - DNA, 20 bp, Artificial Sequence
  Description of Artificial Sequence: Synthetic oligonucleotide
  Target: LAMA2; (+) strand; PAM type: YTN; PAM sequence: CTT
aaaatatccataagcaagag

SEQ ID NO: 408158 - DNA, 20 bp, Artificial Sequence
  Description of Artificial Sequence: Synthetic oligonucleotide
  Target: LAMA2; (+) strand; PAM type: YTN; PAM sequence: TTA
aaatatccataagcaagagt

SEQ ID NO: 408159 - DNA, 20 bp, Artificial Sequence
  Description of Artificial Sequence: Synthetic oligonucleotide
  Target: LAMA2; (+) strand; PAM type: YTN; PAM sequence: TTA
gcaagaattttatagaaact

SEQ ID NO: 408160 - DNA, 20 bp, Artificial Sequence
  Description of Artificial Sequence: Synthetic oligonucleotide
  Target: LAMA2; (+) strand; PAM type: YTN; PAM sequence: TTT
tatagaaactcaatagtgat

SEQ ID NO: 408161 - DNA, 20 bp, Artificial Sequence
  Description of Artificial Sequence: Synthetic oligonucleotide
  Target: LAMA2; (+) strand; PAM type: YTN; PAM sequence: TTT
atagaaactcaatagtgatc

SEQ ID NO: 408162 - DNA, 20 bp, Artificial Sequence
  Description of Artificial Sequence: Synthetic oligonucleotide
  Target: LAMA2; (+) strand; PAM type: YTN; PAM sequence: TTA
tagaaactcaatagtgatca

SEQ ID NO: 408163 - DNA, 20 bp, Artificial Sequence
  Description of Artificial Sequence: Synthetic oligonucleotide
  Target: LAMA2; (+) strand; PAM type: YTN; PAM sequence: CTC
aatagtgatcagcttgtttt

SEQ ID NO: 408164 - DNA, 20 bp, Artificial Sequence
  Description of Artificial Sequence: Synthetic oligonucleotide
  Target: LAMA2; (+) strand; PAM type: YTN; PAM sequence: CTT
gtttttaaaatgaaaacgtt

SEQ ID NO: 408165 - DNA, 20 bp, Artificial Sequence
  Description of Artificial Sequence: Synthetic oligonucleotide
  Target: LAMA2; (+) strand; PAM type: YTN; PAM sequence: TTG
tttttaaaatgaaaacgtta

SEQ ID NO: 408166 - DNA, 20 bp, Artificial Sequence
  Description of Artificial Sequence: Synthetic oligonucleotide
  Target: LAMA2; (+) strand; PAM type: YTN; PAM sequence: TTT
ttaaaatgaaaacgttaaat

SEQ ID NO: 408167 - DNA, 20 bp, Artificial Sequence
  Description of Artificial Sequence: Synthetic oligonucleotide
  Target: LAMA2; (+) strand; PAM type: YTN; PAM sequence: TTT
taaaatgaaaacgttaaata

SEQ ID NO: 408168 - DNA, 20 bp, Artificial Sequence
  Description of Artificial Sequence: Synthetic oligonucleotide
  Target: LAMA2; (+) strand; PAM type: YTN; PAM sequence: TTT
aaaatgaaaacgttaaatat

SEQ ID NO: 408169 - DNA, 20 bp, Artificial Sequence
  Description of Artificial Sequence: Synthetic oligonucleotide
  Target: LAMA2; (+) strand; PAM type: YTN; PAM sequence: TTA
aaatgaaaacgttaaatatg

SEQ ID NO: 408170 - DNA, 20 bp, Artificial Sequence
  Description of Artificial Sequence: Synthetic oligonucleotide
  Target: LAMA2; (+) strand; PAM type: YTN; PAM sequence: TTA
aatatgtcattctcatacat

SEQ ID NO: 408171 - DNA, 20 bp, Artificial Sequence
  Description of Artificial Sequence: Synthetic oligonucleotide
  Target: LAMA2; (+) strand; PAM type: YTN; PAM sequence: TTC
tcatacatttttaattatcc

SEQ ID NO: 408172 - DNA, 20 bp, Artificial Sequence
  Description of Artificial Sequence: Synthetic oligonucleotide
  Target: LAMA2; (+) strand; PAM type: YTN; PAM sequence: CTC
atacatttttaattatccta

SEQ ID NO: 408173 - DNA, 20 bp, Artificial Sequence
  Description of Artificial Sequence: Synthetic oligonucleotide
  Target: LAMA2; (+) strand; PAM type: YTN; PAM sequence: TTT
ttaattatcctatcataata

SEQ ID NO: 408174 - DNA, 20 bp, Artificial Sequence
  Description of Artificial Sequence: Synthetic oligonucleotide
  Target: LAMA2; (+) strand; PAM type: YTN; PAM sequence: TTT
taattatcctatcataatac

SEQ ID NO: 408175 - DNA, 20 bp, Artificial Sequence
  Description of Artificial Sequence: Synthetic oligonucleotide
  Target: LAMA2; (+) strand; PAM type: YTN; PAM sequence: TTT
aattatcctatcataataca

SEQ ID NO: 408176 - DNA, 20 bp, Artificial Sequence
  Description of Artificial Sequence: Synthetic oligonucleotide
  Target: LAMA2; (+) strand; PAM type: YTN; PAM sequence: TTA
attatcctatcataatacaa

SEQ ID NO: 408177 - DNA, 20 bp, Artificial Sequence
  Description of Artificial Sequence: Synthetic oligonucleotide
  Target: LAMA2; (+) strand; PAM type: YTN; PAM sequence: TTA
tcctatcataatacaattat

SEQ ID NO: 408178 - DNA, 20 bp, Artificial Sequence
  Description of Artificial Sequence: Synthetic oligonucleotide
  Target: LAMA2; (+) strand; PAM type: YTN; PAM sequence: CTA
tcataatacaattattcatt

SEQ ID NO: 408179 - DNA, 20 bp, Artificial Sequence
  Description of Artificial Sequence: Synthetic oligonucleotide
  Target: LAMA2; (+) strand; PAM type: YTN; PAM sequence: TTA
ttcattttgtctgctgcttc

SEQ ID NO: 408180 - DNA, 20 bp, Artificial Sequence
  Description of Artificial Sequence: Synthetic oligonucleotide
  Target: LAMA2; (+) strand; PAM type: YTN; PAM sequence: TTC
attttgtctgctgcttctaa

SEQ ID NO: 408181 - DNA, 20 bp, Artificial Sequence
  Description of Artificial Sequence: Synthetic oligonucleotide
  Target: LAMA2; (+) strand; PAM type: YTN; PAM sequence: TTT
tgtctgctgcttctaatcaa

SEQ ID NO: 408182 - DNA, 20 bp, Artificial Sequence
  Description of Artificial Sequence: Synthetic oligonucleotide
  Target: LAMA2; (+) strand; PAM type: YTN; PAM sequence: TTT
gtctgctgcttctaatcaaa

SEQ ID NO: 408183 - DNA, 20 bp, Artificial Sequence
  Description of Artificial Sequence: Synthetic oligonucleotide
  Target: LAMA2; (+) strand; PAM type: YTN; PAM sequence: TTG
tctgctgcttctaatcaaaa

SEQ ID NO: 408184 - DNA, 20 bp, Artificial Sequence
  Description of Artificial Sequence: Synthetic oligonucleotide
  Target: LAMA2; (+) strand; PAM type: YTN; PAM sequence: CTG
ctgcttctaatcaaaattat

SEQ ID NO: 408185 - DNA, 20 bp, Artificial Sequence
  Description of Artificial Sequence: Synthetic oligonucleotide
  Target: LAMA2; (+) strand; PAM type: YTN; PAM sequence: CTG
cttctaatcaaaattatctt

SEQ ID NO: 408186 - DNA, 20 bp, Artificial Sequence
  Description of Artificial Sequence: Synthetic oligonucleotide
  Target: LAMA2; (+) strand; PAM type: YTN; PAM sequence: CTT
ctaatcaaaattatcttaaa

SEQ ID NO: 408187 - DNA, 20 bp, Artificial Sequence
  Description of Artificial Sequence: Synthetic oligonucleotide
  Target: LAMA2; (+) strand; PAM type: YTN; PAM sequence: TTC
taatcaaaattatcttaaac

SEQ ID NO: 408188 - DNA, 20 bp, Artificial Sequence
  Description of Artificial Sequence: Synthetic oligonucleotide
  Target: LAMA2; (+) strand; PAM type: YTN; PAM sequence: CTA
atcaaaattatcttaaacca

SEQ ID NO: 408189 - DNA, 20 bp, Artificial Sequence
  Description of Artificial Sequence: Synthetic oligonucleotide
  Target: LAMA2; (+) strand; PAM type: YTN; PAM sequence: TTA
tcttaaaccactccaataga

SEQ ID NO: 408190 - DNA, 20 bp, Artificial Sequence
  Description of Artificial Sequence: Synthetic oligonucleotide
  Target: LAMA2; (+) strand; PAM type: YTN; PAM sequence: CTT
aaaccactccaatagaatta

SEQ ID NO: 408191 - DNA, 20 bp, Artificial Sequence
  Description of Artificial Sequence: Synthetic oligonucleotide
  Target: LAMA2; (+) strand; PAM type: YTN; PAM sequence: TTA
aaccactccaatagaattag

SEQ ID NO: 408192 - DNA, 20 bp, Artificial Sequence
  Description of Artificial Sequence: Synthetic oligonucleotide
  Target: LAMA2; (+) strand; PAM type: YTN; PAM sequence: CTC
caatagaattagggaaatga

SEQ ID NO: 408193 - DNA, 20 bp, Artificial Sequence
  Description of Artificial Sequence: Synthetic oligonucleotide
  Target: LAMA2; (+) strand; PAM type: YTN; PAM sequence: TTA
gggaaatgaagggaaaatgt

SEQ ID NO: 408194 - DNA, 20 bp, Artificial Sequence
  Description of Artificial Sequence: Synthetic oligonucleotide
  Target: LAMA2; (+) strand; PAM type: YTN; PAM sequence: CTT
gaatgatgaggtttaaagac

SEQ ID NO: 408195 - DNA, 20 bp, Artificial Sequence
  Description of Artificial Sequence: Synthetic oligonucleotide
  Target: LAMA2; (+) strand; PAM type: YTN; PAM sequence: TTG
aatgatgaggtttaaagact

SEQ ID NO: 408196 - DNA, 20 bp, Artificial Sequence
  Description of Artificial Sequence: Synthetic oligonucleotide
  Target: LAMA2; (+) strand; PAM type: YTN; PAM sequence: TTT
aaagactggaacagaacttt

SEQ ID NO: 408197 - DNA, 20 bp, Artificial Sequence
  Description of Artificial Sequence: Synthetic oligonucleotide
  Target: LAMA2; (+) strand; PAM type: YTN; PAM sequence: TTA
aagactggaacagaactttc

SEQ ID NO: 408198 - DNA, 20 bp, Artificial Sequence
  Description of Artificial Sequence: Synthetic oligonucleotide
  Target: LAMA2; (+) strand; PAM type: YTN; PAM sequence: CTG
gaacagaactttcaggatct

SEQ ID NO: 408199 - DNA, 20 bp, Artificial Sequence
  Description of Artificial Sequence: Synthetic oligonucleotide
  Target: LAMA2; (+) strand; PAM type: YTN; PAM sequence: CTT
tcaggatcttcattgttcat

SEQ ID NO: 408200 - DNA, 20 bp, Artificial Sequence
  Description of Artificial Sequence: Synthetic oligonucleotide
  Target: LAMA2; (+) strand; PAM type: YTN; PAM sequence: TTT
caggatcttcattgttcata

SEQ ID NO: 408201 - DNA, 20 bp, Artificial Sequence
  Description of Artificial Sequence: Synthetic oligonucleotide
  Target: LAMA2; (+) strand; PAM type: YTN; PAM sequence: TTC
aggatcttcattgttcatag

SEQ ID NO: 408202 - DNA, 20 bp, Artificial Sequence
  Description of Artificial Sequence: Synthetic oligonucleotide
  Target: LAMA2; (+) strand; PAM type: YTN; PAM sequence: CTT
cattgttcatagctacaggc

SEQ ID NO: 408203 - DNA, 20 bp, Artificial Sequence
  Description of Artificial Sequence: Synthetic oligonucleotide
  Target: LAMA2; (+) strand; PAM type: YTN; PAM sequence: TTC
attgttcatagctacaggct

SEQ ID NO: 408204 - DNA, 20 bp, Artificial Sequence
  Description of Artificial Sequence: Synthetic oligonucleotide
  Target: LAMA2; (+) strand; PAM type: YTN; PAM sequence: TTG
ttcatagctacaggctccaa

SEQ ID NO: 408205 - DNA, 20 bp, Artificial Sequence
  Description of Artificial Sequence: Synthetic oligonucleotide
  Target: LAMA2; (+) strand; PAM type: YTN; PAM sequence: TTC
atagctacaggctccaattt

SEQ ID NO: 408206 - DNA, 20 bp, Artificial Sequence
  Description of Artificial Sequence: Synthetic oligonucleotide
  Target: LAMA2; (+) strand; PAM type: YTN; PAM sequence: CTA
caggctccaatttggaattg

SEQ ID NO: 408207 - DNA, 20 bp, Artificial Sequence
  Description of Artificial Sequence: Synthetic oligonucleotide
  Target: LAMA2; (+) strand; PAM type: YTN; PAM sequence: CTC
caatttggaattggccatag

SEQ ID NO: 408208 - DNA, 20 bp, Artificial Sequence
  Description of Artificial Sequence: Synthetic oligonucleotide
  Target: LAMA2; (+) strand; PAM type: YTN; PAM sequence: TTT
ggaattggccatagacaccc

SEQ ID NO: 408209 - DNA, 20 bp, Artificial Sequence
  Description of Artificial Sequence: Synthetic oligonucleotide
  Target: LAMA2; (+) strand; PAM type: YTN; PAM sequence: TTG
gaattggccatagacaccca

SEQ ID NO: 408210 - DNA, 20 bp, Artificial Sequence
  Description of Artificial Sequence: Synthetic oligonucleotide
  Target: LAMA2; (+) strand; PAM type: YTN; PAM sequence: TTG
gccatagacacccactctga

SEQ ID NO: 408211 - DNA, 20 bp, Artificial Sequence
  Description of Artificial Sequence: Synthetic oligonucleotide
  Target: LAMA2; (+) strand; PAM type: YTN; PAM sequence: CTC
tgagaagtttgggaataaga

SEQ ID NO: 408212 - DNA, 20 bp, Artificial Sequence
  Description of Artificial Sequence: Synthetic oligonucleotide
  Target: LAMA2; (+) strand; PAM type: YTN; PAM sequence: CTG
agaagtttgggaataagaaa

SEQ ID NO: 408213 - DNA, 20 bp, Artificial Sequence
  Description of Artificial Sequence: Synthetic oligonucleotide
  Target: LAMA2; (+) strand; PAM type: YTN; PAM sequence: TTT
gggaataagaaaagagaaaa

SEQ ID NO: 408214 - DNA, 20 bp, Artificial Sequence
  Description of Artificial Sequence: Synthetic oligonucleotide
  Target: LAMA2; (+) strand; PAM type: YTN; PAM sequence: TTG
ggaataagaaaagagaaaac

SEQ ID NO: 408215 - DNA, 20 bp, Artificial Sequence
  Description of Artificial Sequence: Synthetic oligonucleotide
  Target: LAMA2; (+) strand; PAM type: YTN; PAM sequence: TTA
agaactaaaactgtaaggac

SEQ ID NO: 408216 - DNA, 20 bp, Artificial Sequence
  Description of Artificial Sequence: Synthetic oligonucleotide
  Target: LAMA2; (+) strand; PAM type: YTN; PAM sequence: CTA
aaactgtaaggacccatact

SEQ ID NO: 408217 - DNA, 20 bp, Artificial Sequence
  Description of Artificial Sequence: Synthetic oligonucleotide
  Target: LAMA2; (+) strand; PAM type: YTN; PAM sequence: CTG
taaggacccatactggcttc

SEQ ID NO: 408218 - DNA, 20 bp, Artificial Sequence
  Description of Artificial Sequence: Synthetic oligonucleotide
  Target: LAMA2; (+) strand; PAM type: YTN; PAM sequence: CTG
gcttcttaaaggaagtttta

SEQ ID NO: 408219 - DNA, 20 bp, Artificial Sequence
  Description of Artificial Sequence: Synthetic oligonucleotide
  Target: LAMA2; (+) strand; PAM type: YTN; PAM sequence: CTT
cttaaaggaagttttactga

SEQ ID NO: 408220 - DNA, 20 bp, Artificial Sequence
  Description of Artificial Sequence: Synthetic oligonucleotide
  Target: LAMA2; (+) strand; PAM type: YTN; PAM sequence: TTC
ttaaaggaagttttactgag

SEQ ID NO: 408221 - DNA, 20 bp, Artificial Sequence
  Description of Artificial Sequence: Synthetic oligonucleotide
  Target: LAMA2; (+) strand; PAM type: YTN; PAM sequence: CTT
aaaggaagttttactgagaa

SEQ ID NO: 408222 - DNA, 20 bp, Artificial Sequence
  Description of Artificial Sequence: Synthetic oligonucleotide
  Target: LAMA2; (+) strand; PAM type: YTN; PAM sequence: TTA
aaggaagttttactgagaat

SEQ ID NO: 408223 - DNA, 20 bp, Artificial Sequence
  Description of Artificial Sequence: Synthetic oligonucleotide
  Target: LAMA2; (+) strand; PAM type: YTN; PAM sequence: TTT
tactgagaattttaatcttc

SEQ ID NO: 408224 - DNA, 20 bp, Artificial Sequence
  Description of Artificial Sequence: Synthetic oligonucleotide
  Target: LAMA2; (+) strand; PAM type: YTN; PAM sequence: TTT
actgagaattttaatcttca

SEQ ID NO: 408225 - DNA, 20 bp, Artificial Sequence
  Description of Artificial Sequence: Synthetic oligonucleotide
  Target: LAMA2; (+) strand; PAM type: YTN; PAM sequence: TTA
ctgagaattttaatcttcaa

SEQ ID NO: 408226 - DNA, 20 bp, Artificial Sequence
  Description of Artificial Sequence: Synthetic oligonucleotide
  Target: LAMA2; (+) strand; PAM type: YTN; PAM sequence: CTG
agaattttaatcttcaaagc

SEQ ID NO: 408227 - DNA, 20 bp, Artificial Sequence
  Description of Artificial Sequence: Synthetic oligonucleotide
  Target: LAMA2; (+) strand; PAM type: YTN; PAM sequence: TTT
taatcttcaaagcctaactc

SEQ ID NO: 408228 - DNA, 20 bp, Artificial Sequence
  Description of Artificial Sequence: Synthetic oligonucleotide
  Target: LAMA2; (+) strand; PAM type: YTN; PAM sequence: TTT
aatcttcaaagcctaactct

SEQ ID NO: 408229 - DNA, 20 bp, Artificial Sequence
  Description of Artificial Sequence: Synthetic oligonucleotide
  Target: LAMA2; (+) strand; PAM type: YTN; PAM sequence: TTA
atcttcaaagcctaactctc

SEQ ID NO: 408230 - DNA, 20 bp, Artificial Sequence
  Description of Artificial Sequence: Synthetic oligonucleotide
  Target: LAMA2; (+) strand; PAM type: YTN; PAM sequence: CTT
caaagcctaactctcattca

SEQ ID NO: 408231 - DNA, 20 bp, Artificial Sequence
  Description of Artificial Sequence: Synthetic oligonucleotide
  Target: LAMA2; (+) strand; PAM type: YTN; PAM sequence: TTC
aaagcctaactctcattcac

SEQ ID NO: 408232 - DNA, 20 bp, Artificial Sequence
  Description of Artificial Sequence: Synthetic oligonucleotide
  Target: LAMA2; (+) strand; PAM type: YTN; PAM sequence: CTA
actctcattcacattcaaaa

SEQ ID NO: 408233 - DNA, 20 bp, Artificial Sequence
  Description of Artificial Sequence: Synthetic oligonucleotide
  Target: LAMA2; (+) strand; PAM type: YTN; PAM sequence: CTC
tcattcacattcaaaagata

SEQ ID NO: 408234 - DNA, 20 bp, Artificial Sequence
  Description of Artificial Sequence: Synthetic oligonucleotide
  Target: LAMA2; (+) strand; PAM type: YTN; PAM sequence: CTC
attcacattcaaaagatata

SEQ ID NO: 408235 - DNA, 20 bp, Artificial Sequence
  Description of Artificial Sequence: Synthetic oligonucleotide
  Target: LAMA2; (+) strand; PAM type: YTN; PAM sequence: TTC
acattcaaaagatatataca

SEQ ID NO: 408236 - DNA, 20 bp, Artificial Sequence
  Description of Artificial Sequence: Synthetic oligonucleotide
  Target: LAMA2; (+) strand; PAM type: YTN; PAM sequence: TTC
aaaagatatatacatgagga

SEQ ID NO: 408237 - DNA, 20 bp, Artificial Sequence
  Description of Artificial Sequence: Synthetic oligonucleotide
  Target: LAMA2; (+) strand; PAM type: YTN; PAM sequence: CTG
tccggaaaatgaatagcctc

SEQ ID NO: 408238 - DNA, 20 bp, Artificial Sequence
  Description of Artificial Sequence: Synthetic oligonucleotide
  Target: LAMA2; (+) strand; PAM type: YTN; PAM sequence: CTC
tgcacgtggaaattatgatt

SEQ ID NO: 408239 - DNA, 20 bp, Artificial Sequence
  Description of Artificial Sequence: Synthetic oligonucleotide
  Target: LAMA2; (+) strand; PAM type: YTN; PAM sequence: CTG
cacgtggaaattatgattcc

SEQ ID NO: 408240 - DNA, 20 bp, Artificial Sequence
  Description of Artificial Sequence: Synthetic oligonucleotide
  Target: LAMA2; (+) strand; PAM type: YTN; PAM sequence: TTA
tgattccctaaaggcacttt

SEQ ID NO: 408241 - DNA, 20 bp, Artificial Sequence
  Description of Artificial Sequence: Synthetic oligonucleotide
  Target: LAMA2; (+) strand; PAM type: YTN; PAM sequence: TTC
cctaaaggcactttgcagta

SEQ ID NO: 408242 - DNA, 20 bp, Artificial Sequence
  Description of Artificial Sequence: Synthetic oligonucleotide
  Target: LAMA2; (+) strand; PAM type: YTN; PAM sequence: CTA
aaggcactttgcagtaacca

SEQ ID NO: 408243 - DNA, 20 bp, Artificial Sequence
  Description of Artificial Sequence: Synthetic oligonucleotide
  Target: LAMA2; (+) strand; PAM type: YTN; PAM sequence: CTT
tgcagtaaccaggaattatt

SEQ ID NO: 408244 - DNA, 20 bp, Artificial Sequence
  Description of Artificial Sequence: Synthetic oligonucleotide
  Target: LAMA2; (+) strand; PAM type: YTN; PAM sequence: TTT
gcagtaaccaggaattattt

SEQ ID NO: 408245 - DNA, 20 bp, Artificial Sequence
  Description of Artificial Sequence: Synthetic oligonucleotide
  Target: LAMA2; (+) strand; PAM type: YTN; PAM sequence: TTG
cagtaaccaggaattatttt

SEQ ID NO: 408246 - DNA, 20 bp, Artificial Sequence
  Description of Artificial Sequence: Synthetic oligonucleotide
  Target: LAMA2; (+) strand; PAM type: YTN; PAM sequence: TTA
ttttgcaactaaaatatgag

SEQ ID NO: 408247 - DNA, 20 bp, Artificial Sequence
  Description of Artificial Sequence: Synthetic oligonucleotide
  Target: LAMA2; (+) strand; PAM type: YTN; PAM sequence: TTT
tgcaactaaaatatgaggca

SEQ ID NO: 408248 - DNA, 20 bp, Artificial Sequence
  Description of Artificial Sequence: Synthetic oligonucleotide
  Target: LAMA2; (+) strand; PAM type: YTN; PAM sequence: TTT
gcaactaaaatatgaggcag

SEQ ID NO: 408249 - DNA, 20 bp, Artificial Sequence
  Description of Artificial Sequence: Synthetic oligonucleotide
  Target: LAMA2; (+) strand; PAM type: YTN; PAM sequence: TTG
caactaaaatatgaggcaga

SEQ ID NO: 408250 - DNA, 20 bp, Artificial Sequence
  Description of Artificial Sequence: Synthetic oligonucleotide
  Target: LAMA2; (+) strand; PAM type: YTN; PAM sequence: CTA
aaatatgaggcagaaatttg

SEQ ID NO: 408251 - DNA, 20 bp, Artificial Sequence
  Description of Artificial Sequence: Synthetic oligonucleotide
  Target: LAMA2; (+) strand; PAM type: YTN; PAM sequence: TTT
gatgtggataaatattgaaa

SEQ ID NO: 408252 - DNA, 20 bp, Artificial Sequence
  Description of Artificial Sequence: Synthetic oligonucleotide
  Target: LAMA2; (+) strand; PAM type: YTN; PAM sequence: TTG
atgtggataaatattgaaaa

SEQ ID NO: 408253 - DNA, 20 bp, Artificial Sequence
  Description of Artificial Sequence: Synthetic oligonucleotide
  Target: LAMA2; (+) strand; PAM type: YTN; PAM sequence: TTG
aaaagtctgcacagtagttt

SEQ ID NO: 408254 - DNA, 20 bp, Artificial Sequence
  Description of Artificial Sequence: Synthetic oligonucleotide
  Target: LAMA2; (+) strand; PAM type: YTN; PAM sequence: CTG
cacagtagttttatctgaac

SEQ ID NO: 408255 - DNA, 20 bp, Artificial Sequence
  Description of Artificial Sequence: Synthetic oligonucleotide
  Target: LAMA2; (+) strand; PAM type: YTN; PAM sequence: TTT
tatctgaactatctaaaact

SEQ ID NO: 408256 - DNA, 20 bp, Artificial Sequence
  Description of Artificial Sequence: Synthetic oligonucleotide
  Target: LAMA2; (+) strand; PAM type: YTN; PAM sequence: TTT
atctgaactatctaaaactc

SEQ ID NO: 408257 - DNA, 20 bp, Artificial Sequence
  Description of Artificial Sequence: Synthetic oligonucleotide
  Target: LAMA2; (+) strand; PAM type: YTN; PAM sequence: TTA
tctgaactatctaaaactcc

SEQ ID NO: 408258 - DNA, 20 bp, Artificial Sequence
  Description of Artificial Sequence: Synthetic oligonucleotide
  Target: LAMA2; (+) strand; PAM type: YTN; PAM sequence: CTG
aactatctaaaactccatga

SEQ ID NO: 408259 - DNA, 20 bp, Artificial Sequence
  Description of Artificial Sequence: Synthetic oligonucleotide
  Target: LAMA2; (+) strand; PAM type: YTN; PAM sequence: CTA
tctaaaactccatgatttga

SEQ ID NO: 408260 - DNA, 20 bp, Artificial Sequence
  Description of Artificial Sequence: Synthetic oligonucleotide
  Target: LAMA2; (+) strand; PAM type: YTN; PAM sequence: CTA
aaactccatgatttgaaaat

SEQ ID NO: 408261 - DNA, 20 bp, Artificial Sequence
  Description of Artificial Sequence: Synthetic oligonucleotide
  Target: LAMA2; (+) strand; PAM type: YTN; PAM sequence: CTC
catgatttgaaaattggaat

SEQ ID NO: 408262 - DNA, 20 bp, Artificial Sequence
  Description of Artificial Sequence: Synthetic oligonucleotide
  Target: LAMA2; (+) strand; PAM type: YTN; PAM sequence: TTT
gaaaattggaatagaaaaca

SEQ ID NO: 408263 - DNA, 20 bp, Artificial Sequence
  Description of Artificial Sequence: Synthetic oligonucleotide
  Target: LAMA2; (+) strand; PAM type: YTN; PAM sequence: TTG
aaaattggaatagaaaacag

SEQ ID NO: 408264 - DNA, 20 bp, Artificial Sequence
  Description of Artificial Sequence: Synthetic oligonucleotide
  Target: LAMA2; (+) strand; PAM type: YTN; PAM sequence: TTG
gaatagaaaacagattatac

SEQ ID NO: 408265 - DNA, 20 bp, Artificial Sequence
  Description of Artificial Sequence: Synthetic oligonucleotide
  Target: LAMA2; (+) strand; PAM type: YTN; PAM sequence: TTA
tacattttaccagctcttgt

SEQ ID NO: 408266 - DNA, 20 bp, Artificial Sequence
  Description of Artificial Sequence: Synthetic oligonucleotide
  Target: LAMA2; (+) strand; PAM type: YTN; PAM sequence: TTT
taccagctcttgtgtcattt

SEQ ID NO: 408267 - DNA, 20 bp, Artificial Sequence
  Description of Artificial Sequence: Synthetic oligonucleotide
  Target: LAMA2; (+) strand; PAM type: YTN; PAM sequence: TTT
accagctcttgtgtcattta

SEQ ID NO: 408268 - DNA, 20 bp, Artificial Sequence
  Description of Artificial Sequence: Synthetic oligonucleotide
  Target: LAMA2; (+) strand; PAM type: YTN; PAM sequence: TTA
ccagctcttgtgtcatttaa

SEQ ID NO: 408269 - DNA, 20 bp, Artificial Sequence
  Description of Artificial Sequence: Synthetic oligonucleotide
  Target: LAMA2; (+) strand; PAM type: YTN; PAM sequence: CTC
ttgtgtcatttaactggtct

SEQ ID NO: 408270 - DNA, 20 bp, Artificial Sequence
  Description of Artificial Sequence: Synthetic oligonucleotide
  Target: LAMA2; (+) strand; PAM type: YTN; PAM sequence: CTT
gtgtcatttaactggtcttg

SEQ ID NO: 408271 - DNA, 20 bp, Artificial Sequence
  Description of Artificial Sequence: Synthetic oligonucleotide
  Target: LAMA2; (+) strand; PAM type: YTN; PAM sequence: TTG
tgtcatttaactggtcttga

SEQ ID NO: 408272 - DNA, 20 bp, Artificial Sequence
  Description of Artificial Sequence: Synthetic oligonucleotide
  Target: LAMA2; (+) strand; PAM type: YTN; PAM sequence: TTT
aactggtcttgaaacactgt

SEQ ID NO: 408273 - DNA, 20 bp, Artificial Sequence
  Description of Artificial Sequence: Synthetic oligonucleotide
  Target: LAMA2; (+) strand; PAM type: YTN; PAM sequence: TTA
actggtcttgaaacactgtg

SEQ ID NO: 408274 - DNA, 20 bp, Artificial Sequence
  Description of Artificial Sequence: Synthetic oligonucleotide
  Target: LAMA2; (+) strand; PAM type: YTN; PAM sequence: CTG
gtcttgaaacactgtgggag

SEQ ID NO: 408275 - DNA, 20 bp, Artificial Sequence
  Description of Artificial Sequence: Synthetic oligonucleotide
  Target: LAMA2; (+) strand; PAM type: YTN; PAM sequence: CTT
gaaacactgtgggaggaaaa

SEQ ID NO: 408276 - DNA, 20 bp, Artificial Sequence
  Description of Artificial Sequence: Synthetic oligonucleotide
  Target: LAMA2; (+) strand; PAM type: YTN; PAM sequence: TTG
aaacactgtgggaggaaaat

SEQ ID NO: 408277 - DNA, 20 bp, Artificial Sequence
  Description of Artificial Sequence: Synthetic oligonucleotide
  Target: LAMA2; (+) strand; PAM type: YTN; PAM sequence: CTG
tgggaggaaaatagcctaca

SEQ ID NO: 408278 - DNA, 20 bp, Artificial Sequence
  Description of Artificial Sequence: Synthetic oligonucleotide
  Target: LAMA2; (+) strand; PAM type: YTN; PAM sequence: CTA
cattaaaggattctttgctt

SEQ ID NO: 408279 - DNA, 20 bp, Artificial Sequence
  Description of Artificial Sequence: Synthetic oligonucleotide
  Target: LAMA2; (+) strand; PAM type: YTN; PAM sequence: TTA
aaggattctttgcttttact

SEQ ID NO: 408280 - DNA, 20 bp, Artificial Sequence
  Description of Artificial Sequence: Synthetic oligonucleotide
  Target: LAMA2; (+) strand; PAM type: YTN; PAM sequence: TTC
tttgcttttactcctacaaa

SEQ ID NO: 408281 - DNA, 20 bp, Artificial Sequence
  Description of Artificial Sequence: Synthetic oligonucleotide
  Target: LAMA2; (+) strand; PAM type: YTN; PAM sequence: CTT
tgcttttactcctacaaaat

SEQ ID NO: 408282 - DNA, 20 bp, Artificial Sequence
  Description of Artificial Sequence: Synthetic oligonucleotide
  Target: LAMA2; (+) strand; PAM type: YTN; PAM sequence: TTT
gcttttactcctacaaaatc

SEQ ID NO: 408283 - DNA, 20 bp, Artificial Sequence
  Description of Artificial Sequence: Synthetic oligonucleotide
  Target: LAMA2; (+) strand; PAM type: YTN; PAM sequence: TTG
cttttactcctacaaaatct

SEQ ID NO: 408284 - DNA, 20 bp, Artificial Sequence
  Description of Artificial Sequence: Synthetic oligonucleotide
  Target: LAMA2; (+) strand; PAM type: YTN; PAM sequence: CTT
ttactcctacaaaatctagg

SEQ ID NO: 408285 - DNA, 20 bp, Artificial Sequence
  Description of Artificial Sequence: Synthetic oligonucleotide
  Target: LAMA2; (+) strand; PAM type: YTN; PAM sequence: TTT
tactcctacaaaatctagga

SEQ ID NO: 408286 - DNA, 20 bp, Artificial Sequence
  Description of Artificial Sequence: Synthetic oligonucleotide
  Target: LAMA2; (+) strand; PAM type: YTN; PAM sequence: TTT
actcctacaaaatctaggac

SEQ ID NO: 408287 - DNA, 20 bp, Artificial Sequence
  Description of Artificial Sequence: Synthetic oligonucleotide
  Target: LAMA2; (+) strand; PAM type: YTN; PAM sequence: TTA
ctcctacaaaatctaggact

SEQ ID NO: 408288 - DNA, 20 bp, Artificial Sequence
  Description of Artificial Sequence: Synthetic oligonucleotide
  Target: LAMA2; (+) strand; PAM type: YTN; PAM sequence: CTC
ctacaaaatctaggacttta

SEQ ID NO: 408289 - DNA, 20 bp, Artificial Sequence
  Description of Artificial Sequence: Synthetic oligonucleotide
  Target: LAMA2; (+) strand; PAM type: YTN; PAM sequence: CTA
caaaatctaggactttaaaa

SEQ ID NO: 408290 - DNA, 20 bp, Artificial Sequence
  Description of Artificial Sequence: Synthetic oligonucleotide
  Target: LAMA2; (+) strand; PAM type: YTN; PAM sequence: CTA
ggactttaaaaatgaatatt

SEQ ID NO: 408291 - DNA, 20 bp, Artificial Sequence
  Description of Artificial Sequence: Synthetic oligonucleotide
  Target: LAMA2; (+) strand; PAM type: YTN; PAM sequence: CTT
taaaaatgaatattttaagc

SEQ ID NO: 408292 - DNA, 20 bp, Artificial Sequence
  Description of Artificial Sequence: Synthetic oligonucleotide
  Target: LAMA2; (+) strand; PAM type: YTN; PAM sequence: TTT
aaaaatgaatattttaagca

SEQ ID NO: 408293 - DNA, 20 bp, Artificial Sequence
  Description of Artificial Sequence: Synthetic oligonucleotide
  Target: LAMA2; (+) strand; PAM type: YTN; PAM sequence: TTA
aaaatgaatattttaagcac

SEQ ID NO: 408294 - DNA, 20 bp, Artificial Sequence
  Description of Artificial Sequence: Synthetic oligonucleotide
  Target: LAMA2; (+) strand; PAM type: YTN; PAM sequence: TTT
taagcactttaaattcctaa

SEQ ID NO: 408295 - DNA, 20 bp, Artificial Sequence
  Description of Artificial Sequence: Synthetic oligonucleotide
  Target: LAMA2; (+) strand; PAM type: YTN; PAM sequence: TTT
aagcactttaaattcctaac

SEQ ID NO: 408296 - DNA, 20 bp, Artificial Sequence
  Description of Artificial Sequence: Synthetic oligonucleotide
  Target: LAMA2; (+) strand; PAM type: YTN; PAM sequence: TTA
agcactttaaattcctaact

SEQ ID NO: 408297 - DNA, 20 bp, Artificial Sequence
  Description of Artificial Sequence: Synthetic oligonucleotide
  Target: LAMA2; (+) strand; PAM type: YTN; PAM sequence: CTT
taaattcctaactacatggg

SEQ ID NO: 408298 - DNA, 20 bp, Artificial Sequence
  Description of Artificial Sequence: Synthetic oligonucleotide
  Target: LAMA2; (+) strand; PAM type: YTN; PAM sequence: TTT
aaattcctaactacatgggc

SEQ ID NO: 408299 - DNA, 20 bp, Artificial Sequence
  Description of Artificial Sequence: Synthetic oligonucleotide
  Target: LAMA2; (+) strand; PAM type: YTN; PAM sequence: TTA
aattcctaactacatgggct

SEQ ID NO: 408300 - DNA, 20 bp, Artificial Sequence
  Description of Artificial Sequence: Synthetic oligonucleotide
  Target: LAMA2; (+) strand; PAM type: YTN; PAM sequence: TTC
ctaactacatgggcttgctt

SEQ ID NO: 408301 - DNA, 20 bp, Artificial Sequence
  Description of Artificial Sequence: Synthetic oligonucleotide
  Target: LAMA2; (+) strand; PAM type: YTN; PAM sequence: CTA
actacatgggcttgcttaaa

SEQ ID NO: 408302 - DNA, 20 bp, Artificial Sequence
  Description of Artificial Sequence: Synthetic oligonucleotide
  Target: LAMA2; (+) strand; PAM type: YTN; PAM sequence: CTA
catgggcttgcttaaataaa

SEQ ID NO: 408303 - DNA, 20 bp, Artificial Sequence
  Description of Artificial Sequence: Synthetic oligonucleotide
  Target: LAMA2; (+) strand; PAM type: YTN; PAM sequence: CTT
gcttaaataaatactagcaa

SEQ ID NO: 408304 - DNA, 20 bp, Artificial Sequence
  Description of Artificial Sequence: Synthetic oligonucleotide
  Target: LAMA2; (+) strand; PAM type: YTN; PAM sequence: TTG
cttaaataaatactagcaaa

SEQ ID NO: 408305 - DNA, 20 bp, Artificial Sequence
  Description of Artificial Sequence: Synthetic oligonucleotide
  Target: LAMA2; (+) strand; PAM type: YTN; PAM sequence: CTT
aaataaatactagcaaattc

SEQ ID NO: 408306 - DNA, 20 bp, Artificial Sequence
  Description of Artificial Sequence: Synthetic oligonucleotide
  Target: LAMA2; (+) strand; PAM type: YTN; PAM sequence: TTA
aataaatactagcaaattca

SEQ ID NO: 408307 - DNA, 20 bp, Artificial Sequence
  Description of Artificial Sequence: Synthetic oligonucleotide
  Target: LAMA2; (+) strand; PAM type: YTN; PAM sequence: CTA
gcaaattcataaagtagaaa

SEQ ID NO: 408308 - DNA, 20 bp, Artificial Sequence
  Description of Artificial Sequence: Synthetic oligonucleotide
  Target: LAMA2; (+) strand; PAM type: YTN; PAM sequence: TTC
ataaagtagaaagtcctcct

SEQ ID NO: 408309 - DNA, 20 bp, Artificial Sequence
  Description of Artificial Sequence: Synthetic oligonucleotide
  Target: LAMA2; (+) strand; PAM type: YTN; PAM sequence: CTC
ctgccattaaaagtgactat

SEQ ID NO: 408310 - DNA, 20 bp, Artificial Sequence
  Description of Artificial Sequence: Synthetic oligonucleotide
  Target: LAMA2; (+) strand; PAM type: YTN; PAM sequence: CTG
ccattaaaagtgactatcta

SEQ ID NO: 408311 - DNA, 20 bp, Artificial Sequence
  Description of Artificial Sequence: Synthetic oligonucleotide
  Target: LAMA2; (+) strand; PAM type: YTN; PAM sequence: TTA
aaagtgactatctacattta

SEQ ID NO: 408312 - DNA, 20 bp, Artificial Sequence
  Description of Artificial Sequence: Synthetic oligonucleotide
  Target: LAMA2; (+) strand; PAM type: YTN; PAM sequence: CTA
tctacatttactgagagagt

SEQ ID NO: 408313 - DNA, 20 bp, Artificial Sequence
  Description of Artificial Sequence: Synthetic oligonucleotide
  Target: LAMA2; (+) strand; PAM type: YTN; PAM sequence: CTA
catttactgagagagtgata

SEQ ID NO: 408314 - DNA, 20 bp, Artificial Sequence
  Description of Artificial Sequence: Synthetic oligonucleotide
  Target: LAMA2; (+) strand; PAM type: YTN; PAM sequence: TTT
actgagagagtgatatcttc

SEQ ID NO: 408315 - DNA, 20 bp, Artificial Sequence
  Description of Artificial Sequence: Synthetic oligonucleotide
  Target: LAMA2; (+) strand; PAM type: YTN; PAM sequence: TTA
ctgagagagtgatatcttcc

SEQ ID NO: 408316 - DNA, 20 bp, Artificial Sequence
  Description of Artificial Sequence: Synthetic oligonucleotide
  Target: LAMA2; (+) strand; PAM type: YTN; PAM sequence: CTG
agagagtgatatcttccaca

SEQ ID NO: 408317 - DNA, 20 bp, Artificial Sequence
  Description of Artificial Sequence: Synthetic oligonucleotide
  Target: LAMA2; (+) strand; PAM type: YTN; PAM sequence: CTT
ccacatatgtaagaaaaaaa

SEQ ID NO: 408318 - DNA, 20 bp, Artificial Sequence
  Description of Artificial Sequence: Synthetic oligonucleotide
  Target: LAMA2; (+) strand; PAM type: YTN; PAM sequence: TTC
cacatatgtaagaaaaaaaa

SEQ ID NO: 408319 - DNA, 20 bp, Artificial Sequence
  Description of Artificial Sequence: Synthetic oligonucleotide
  Target: LAMA2; (+) strand; PAM type: YTN; PAM sequence: TTA
ggaatgaacatgtctatcaa

SEQ ID NO: 408320 - DNA, 20 bp, Artificial Sequence
  Description of Artificial Sequence: Synthetic oligonucleotide
  Target: LAMA2; (+) strand; PAM type: YTN; PAM sequence: CTA
tcaagattcattttaaatac

SEQ ID NO: 408321 - DNA, 20 bp, Artificial Sequence
  Description of Artificial Sequence: Synthetic oligonucleotide
  Target: LAMA2; (+) strand; PAM type: YTN; PAM sequence: TTC
attttaaatacagggaggag

SEQ ID NO: 408322 - DNA, 20 bp, Artificial Sequence
  Description of Artificial Sequence: Synthetic oligonucleotide
  Target: LAMA2; (+) strand; PAM type: YTN; PAM sequence: TTT
taaatacagggaggaggaga

SEQ ID NO: 408323 - DNA, 20 bp, Artificial Sequence
  Description of Artificial Sequence: Synthetic oligonucleotide
  Target: LAMA2; (+) strand; PAM type: YTN; PAM sequence: TTT
aaatacagggaggaggagag

SEQ ID NO: 408324 - DNA, 20 bp, Artificial Sequence
  Description of Artificial Sequence: Synthetic oligonucleotide
  Target: LAMA2; (+) strand; PAM type: YTN; PAM sequence: TTA
aatacagggaggaggagaga

SEQ ID NO: 408325 - DNA, 20 bp, Artificial Sequence
  Description of Artificial Sequence: Synthetic oligonucleotide
  Target: LAMA2; (+) strand; PAM type: YTN; PAM sequence: TTG
tgaaagagtgaatgaatgaa

SEQ ID NO: 408326 - DNA, 20 bp, Artificial Sequence
  Description of Artificial Sequence: Synthetic oligonucleotide
  Target: LAMA2; (+) strand; PAM type: YTN; PAM sequence: TTA
tagaaagctatatgcttctg

SEQ ID NO: 408327 - DNA, 20 bp, Artificial Sequence
  Description of Artificial Sequence: Synthetic oligonucleotide
  Target: LAMA2; (+) strand; PAM type: YTN; PAM sequence: CTA
tatgcttctgcacagctttg

SEQ ID NO: 408328 - DNA, 20 bp, Artificial Sequence
  Description of Artificial Sequence: Synthetic oligonucleotide
  Target: LAMA2; (+) strand; PAM type: YTN; PAM sequence: CTT
ctgcacagctttgagattga

SEQ ID NO: 408329 - DNA, 20 bp, Artificial Sequence
  Description of Artificial Sequence: Synthetic oligonucleotide
  Target: LAMA2; (+) strand; PAM type: YTN; PAM sequence: TTC
tgcacagctttgagattgag

SEQ ID NO: 408330 - DNA, 20 bp, Artificial Sequence
  Description of Artificial Sequence: Synthetic oligonucleotide
  Target: LAMA2; (+) strand; PAM type: YTN; PAM sequence: CTG
cacagctttgagattgagat

SEQ ID NO: 408331 - DNA, 20 bp, Artificial Sequence
  Description of Artificial Sequence: Synthetic oligonucleotide
  Target: LAMA2; (+) strand; PAM type: YTN; PAM sequence: CTT
tgagattgagatggggagct

SEQ ID NO: 408332 - DNA, 20 bp, Artificial Sequence
  Description of Artificial Sequence: Synthetic oligonucleotide
  Target: LAMA2; (+) strand; PAM type: YTN; PAM sequence: TTT
gagattgagatggggagctg

SEQ ID NO: 408333 - DNA, 20 bp, Artificial Sequence
  Description of Artificial Sequence: Synthetic oligonucleotide
  Target: LAMA2; (+) strand; PAM type: YTN; PAM sequence: TTG
agattgagatggggagctga

SEQ ID NO: 408334 - DNA, 20 bp, Artificial Sequence
  Description of Artificial Sequence: Synthetic oligonucleotide
  Target: LAMA2; (+) strand; PAM type: YTN; PAM sequence: TTG
agatggggagctgattttct

SEQ ID NO: 408335 - DNA, 20 bp, Artificial Sequence
  Description of Artificial Sequence: Synthetic oligonucleotide
  Target: LAMA2; (+) strand; PAM type: YTN; PAM sequence: CTG
attttctcccttttgcacct

SEQ ID NO: 408336 - DNA, 20 bp, Artificial Sequence
  Description of Artificial Sequence: Synthetic oligonucleotide
  Target: LAMA2; (+) strand; PAM type: YTN; PAM sequence: TTT
tctcccttttgcaccttatt

SEQ ID NO: 408337 - DNA, 20 bp, Artificial Sequence
  Description of Artificial Sequence: Synthetic oligonucleotide
  Target: LAMA2; (+) strand; PAM type: YTN; PAM sequence: TTT
ctcccttttgcaccttattt

SEQ ID NO: 408338 - DNA, 20 bp, Artificial Sequence
  Description of Artificial Sequence: Synthetic oligonucleotide
  Target: LAMA2; (+) strand; PAM type: YTN; PAM sequence: TTC
tcccttttgcaccttattta

SEQ ID NO: 408339 - DNA, 20 bp, Artificial Sequence
  Description of Artificial Sequence: Synthetic oligonucleotide
  Target: LAMA2; (+) strand; PAM type: YTN; PAM sequence: CTC
ccttttgcaccttatttaca

SEQ ID NO: 408340 - DNA, 20 bp, Artificial Sequence
  Description of Artificial Sequence: Synthetic oligonucleotide
  Target: LAMA2; (+) strand; PAM type: YTN; PAM sequence: CTT
ttgcaccttatttacatttc

SEQ ID NO: 408341 - DNA, 20 bp, Artificial Sequence
  Description of Artificial Sequence: Synthetic oligonucleotide
  Target: LAMA2; (+) strand; PAM type: YTN; PAM sequence: TTT
tgcaccttatttacatttct

SEQ ID NO: 408342 - DNA, 20 bp, Artificial Sequence
  Description of Artificial Sequence: Synthetic oligonucleotide
  Target: LAMA2; (+) strand; PAM type: YTN; PAM sequence: TTT
gcaccttatttacatttcta

SEQ ID NO: 408343 - DNA, 20 bp, Artificial Sequence
  Description of Artificial Sequence: Synthetic oligonucleotide
  Target: LAMA2; (+) strand; PAM type: YTN; PAM sequence: TTG
caccttatttacatttctac

SEQ ID NO: 408344 - DNA, 20 bp, Artificial Sequence
  Description of Artificial Sequence: Synthetic oligonucleotide
  Target: LAMA2; (+) strand; PAM type: YTN; PAM sequence: CTT
atttacatttctacttgaaa

SEQ ID NO: 408345 - DNA, 20 bp, Artificial Sequence
  Description of Artificial Sequence: Synthetic oligonucleotide
  Target: LAMA2; (+) strand; PAM type: YTN; PAM sequence: TTA
tttacatttctacttgaaat

SEQ ID NO: 408346 - DNA, 20 bp, Artificial Sequence
  Description of Artificial Sequence: Synthetic oligonucleotide
  Target: LAMA2; (+) strand; PAM type: YTN; PAM sequence: TTT
acatttctacttgaaatgta

SEQ ID NO: 408347 - DNA, 20 bp, Artificial Sequence
  Description of Artificial Sequence: Synthetic oligonucleotide
  Target: LAMA2; (+) strand; PAM type: YTN; PAM sequence: TTA
catttctacttgaaatgtaa

SEQ ID NO: 408348 - DNA, 20 bp, Artificial Sequence
  Description of Artificial Sequence: Synthetic oligonucleotide
  Target: LAMA2; (+) strand; PAM type: YTN; PAM sequence: TTT
ctacttgaaatgtaactgtt

SEQ ID NO: 408349 - DNA, 20 bp, Artificial Sequence
  Description of Artificial Sequence: Synthetic oligonucleotide
  Target: LAMA2; (+) strand; PAM type: YTN; PAM sequence: TTC
tacttgaaatgtaactgttt

SEQ ID NO: 408350 - DNA, 20 bp, Artificial Sequence
  Description of Artificial Sequence: Synthetic oligonucleotide
  Target: LAMA2; (+) strand; PAM type: YTN; PAM sequence: CTA
cttgaaatgtaactgtttta

SEQ ID NO: 408351 - DNA, 20 bp, Artificial Sequence
  Description of Artificial Sequence: Synthetic oligonucleotide
  Target: LAMA2; (+) strand; PAM type: YTN; PAM sequence: CTT
gaaatgtaactgttttaatt

SEQ ID NO: 408352 - DNA, 20 bp, Artificial Sequence
  Description of Artificial Sequence: Synthetic oligonucleotide
  Target: LAMA2; (+) strand; PAM type: YTN; PAM sequence: TTG
aaatgtaactgttttaattt

SEQ ID NO: 408353 - DNA, 20 bp, Artificial Sequence
  Description of Artificial Sequence: Synthetic oligonucleotide
  Target: LAMA2; (+) strand; PAM type: YTN; PAM sequence: CTG
ttttaattttatactgagca

SEQ ID NO: 408354 - DNA, 20 bp, Artificial Sequence
  Description of Artificial Sequence: Synthetic oligonucleotide
  Target: LAMA2; (+) strand; PAM type: YTN; PAM sequence: TTT
taattttatactgagcaagg

SEQ ID NO: 408355 - DNA, 20 bp, Artificial Sequence
  Description of Artificial Sequence: Synthetic oligonucleotide
  Target: LAMA2; (+) strand; PAM type: YTN; PAM sequence: TTT
aattttatactgagcaagga

SEQ ID NO: 408356 - DNA, 20 bp, Artificial Sequence
  Description of Artificial Sequence: Synthetic oligonucleotide
  Target: LAMA2; (+) strand; PAM type: YTN; PAM sequence: TTA
attttatactgagcaaggac

SEQ ID NO: 408357 - DNA, 20 bp, Artificial Sequence
  Description of Artificial Sequence: Synthetic oligonucleotide
  Target: LAMA2; (+) strand; PAM type: YTN; PAM sequence: TTT
tatactgagcaaggacaatg

SEQ ID NO: 408358 - DNA, 20 bp, Artificial Sequence
  Description of Artificial Sequence: Synthetic oligonucleotide
  Target: LAMA2; (+) strand; PAM type: YTN; PAM sequence: TTT
atactgagcaaggacaatgg

SEQ ID NO: 408359 - DNA, 20 bp, Artificial Sequence
  Description of Artificial Sequence: Synthetic oligonucleotide
  Target: LAMA2; (+) strand; PAM type: YTN; PAM sequence: TTA
tactgagcaaggacaatggt

SEQ ID NO: 408360 - DNA, 20 bp, Artificial Sequence
  Description of Artificial Sequence: Synthetic oligonucleotide
  Target: LAMA2; (+) strand; PAM type: YTN; PAM sequence: CTG
agcaaggacaatggtattac

SEQ ID NO: 408361 - DNA, 20 bp, Artificial Sequence
  Description of Artificial Sequence: Synthetic oligonucleotide
  Target: LAMA2; (+) strand; PAM type: YTN; PAM sequence: TTA
ctttaatattgagaaaaaac

SEQ ID NO: 408362 - DNA, 20 bp, Artificial Sequence
  Description of Artificial Sequence: Synthetic oligonucleotide
  Target: LAMA2; (+) strand; PAM type: YTN; PAM sequence: CTT
taatattgagaaaaaactag

SEQ ID NO: 408363 - DNA, 20 bp, Artificial Sequence
  Description of Artificial Sequence: Synthetic oligonucleotide
  Target: LAMA2; (+) strand; PAM type: YTN; PAM sequence: TTT
aatattgagaaaaaactaga

SEQ ID NO: 408364 - DNA, 20 bp, Artificial Sequence
  Description of Artificial Sequence: Synthetic oligonucleotide
  Target: LAMA2; (+) strand; PAM type: YTN; PAM sequence: TTA
atattgagaaaaaactagac

SEQ ID NO: 408365 - DNA, 20 bp, Artificial Sequence
  Description of Artificial Sequence: Synthetic oligonucleotide
  Target: LAMA2; (+) strand; PAM type: YTN; PAM sequence: TTG
agaaaaaactagactatgcg

SEQ ID NO: 408366 - DNA, 20 bp, Artificial Sequence
  Description of Artificial Sequence: Synthetic oligonucleotide
  Target: LAMA2; (+) strand; PAM type: YTN; PAM sequence: CTA
gactatgcgatgtttgtttt

SEQ ID NO: 408367 - DNA, 20 bp, Artificial Sequence
  Description of Artificial Sequence: Synthetic oligonucleotide
  Target: LAMA2; (+) strand; PAM type: YTN; PAM sequence: CTA
tgcgatgtttgttttattta

SEQ ID NO: 408368 - DNA, 20 bp, Artificial Sequence
  Description of Artificial Sequence: Synthetic oligonucleotide
  Target: LAMA2; (+) strand; PAM type: YTN; PAM sequence: TTT
gttttatttatttttaaggt

SEQ ID NO: 408369 - DNA, 20 bp, Artificial Sequence
  Description of Artificial Sequence: Synthetic oligonucleotide
  Target: LAMA2; (+) strand; PAM type: YTN; PAM sequence: TTG
ttttatttatttttaaggtt

SEQ ID NO: 408370 - DNA, 20 bp, Artificial Sequence
  Description of Artificial Sequence: Synthetic oligonucleotide
  Target: LAMA2; (+) strand; PAM type: YTN; PAM sequence: TTT
tatttatttttaaggtttgg

SEQ ID NO: 408371 - DNA, 20 bp, Artificial Sequence
  Description of Artificial Sequence: Synthetic oligonucleotide
  Target: LAMA2; (+) strand; PAM type: YTN; PAM sequence: TTT
atttatttttaaggtttggt

SEQ ID NO: 408372 - DNA, 20 bp, Artificial Sequence
  Description of Artificial Sequence: Synthetic oligonucleotide
  Target: LAMA2; (+) strand; PAM type: YTN; PAM sequence: TTA
tttatttttaaggtttggtc

SEQ ID NO: 408373 - DNA, 20 bp, Artificial Sequence
  Description of Artificial Sequence: Synthetic oligonucleotide
  Target: LAMA2; (+) strand; PAM type: YTN; PAM sequence: TTT
atttttaaggtttggtctta

SEQ ID NO: 408374 - DNA, 20 bp, Artificial Sequence
  Description of Artificial Sequence: Synthetic oligonucleotide
  Target: LAMA2; (+) strand; PAM type: YTN; PAM sequence: TTA
tttttaaggtttggtcttat

SEQ ID NO: 408375 - DNA, 20 bp, Artificial Sequence
  Description of Artificial Sequence: Synthetic oligonucleotide
  Target: LAMA2; (+) strand; PAM type: YTN; PAM sequence: TTT
ttaaggtttggtcttatcac

SEQ ID NO: 408376 - DNA, 20 bp, Artificial Sequence
  Description of Artificial Sequence: Synthetic oligonucleotide
  Target: LAMA2; (+) strand; PAM type: YTN; PAM sequence: TTT
taaggtttggtcttatcact

SEQ ID NO: 408377 - DNA, 20 bp, Artificial Sequence
  Description of Artificial Sequence: Synthetic oligonucleotide
  Target: LAMA2; (+) strand; PAM type: YTN; PAM sequence: TTT
aaggtttggtcttatcactg

SEQ ID NO: 408378 - DNA, 20 bp, Artificial Sequence
  Description of Artificial Sequence: Synthetic oligonucleotide
  Target: LAMA2; (+) strand; PAM type: YTN; PAM sequence: TTA
aggtttggtcttatcactgg

SEQ ID NO: 408379 - DNA, 20 bp, Artificial Sequence
  Description of Artificial Sequence: Synthetic oligonucleotide
  Target: LAMA2; (+) strand; PAM type: YTN; PAM sequence: TTT
ggtcttatcactggggaaaa

SEQ ID NO: 408380 - DNA, 20 bp, Artificial Sequence
  Description of Artificial Sequence: Synthetic oligonucleotide
  Target: LAMA2; (+) strand; PAM type: YTN; PAM sequence: TTG
gtcttatcactggggaaaaa

SEQ ID NO: 408381 - DNA, 20 bp, Artificial Sequence
  Description of Artificial Sequence: Synthetic oligonucleotide
  Target: LAMA2; (+) strand; PAM type: YTN; PAM sequence: CTT
atcactggggaaaaatgcag

SEQ ID NO: 408382 - DNA, 20 bp, Artificial Sequence
  Description of Artificial Sequence: Synthetic oligonucleotide
  Target: LAMA2; (+) strand; PAM type: YTN; PAM sequence: TTA
tcactggggaaaaatgcaga

SEQ ID NO: 408383 - DNA, 20 bp, Artificial Sequence
  Description of Artificial Sequence: Synthetic oligonucleotide
  Target: LAMA2; (+) strand; PAM type: YTN; PAM sequence: CTG
gggaaaaatgcagacacaga

SEQ ID NO: 408384 - DNA, 20 bp, Artificial Sequence
  Description of Artificial Sequence: Synthetic oligonucleotide
  Target: LAMA2; (+) strand; PAM type: YTN; PAM sequence: CTG
taaaacataaacaattaagt

SEQ ID NO: 408385 - DNA, 20 bp, Artificial Sequence
  Description of Artificial Sequence: Synthetic oligonucleotide
  Target: LAMA2; (+) strand; PAM type: YTN; PAM sequence: TTA
agtgatagagtttattcaag

SEQ ID NO: 408386 - DNA, 20 bp, Artificial Sequence
  Description of Artificial Sequence: Synthetic oligonucleotide
  Target: LAMA2; (+) strand; PAM type: YTN; PAM sequence: TTT
attcaagagatattcgttac

SEQ ID NO: 408387 - DNA, 20 bp, Artificial Sequence
  Description of Artificial Sequence: Synthetic oligonucleotide
  Target: LAMA2; (+) strand; PAM type: YTN; PAM sequence: TTA
ttcaagagatattcgttaca

SEQ ID NO: 408388 - DNA, 20 bp, Artificial Sequence
  Description of Artificial Sequence: Synthetic oligonucleotide
  Target: LAMA2; (+) strand; PAM type: YTN; PAM sequence: TTC
aagagatattcgttacagtg

SEQ ID NO: 408389 - DNA, 20 bp, Artificial Sequence
  Description of Artificial Sequence: Synthetic oligonucleotide
  Target: LAMA2; (+) strand; PAM type: YTN; PAM sequence: TTC
gttacagtgttttcaaagga

SEQ ID NO: 408390 - DNA, 20 bp, Artificial Sequence
  Description of Artificial Sequence: Synthetic oligonucleotide
  Target: LAMA2; (+) strand; PAM type: YTN; PAM sequence: TTA
cagtgttttcaaaggaaact

SEQ ID NO: 408391 - DNA, 20 bp, Artificial Sequence
  Description of Artificial Sequence: Synthetic oligonucleotide
  Target: LAMA2; (+) strand; PAM type: YTN; PAM sequence: TTT
tcaaaggaaacttagggaca

SEQ ID NO: 408392 - DNA, 20 bp, Artificial Sequence
  Description of Artificial Sequence: Synthetic oligonucleotide
  Target: LAMA2; (+) strand; PAM type: YTN; PAM sequence: TTT
caaaggaaacttagggacaa

SEQ ID NO: 408393 - DNA, 20 bp, Artificial Sequence
  Description of Artificial Sequence: Synthetic oligonucleotide
  Target: LAMA2; (+) strand; PAM type: YTN; PAM sequence: TTC
aaaggaaacttagggacaat

SEQ ID NO: 408394 - DNA, 20 bp, Artificial Sequence
  Description of Artificial Sequence: Synthetic oligonucleotide
  Target: LAMA2; (+) strand; PAM type: YTN; PAM sequence: CTT
agggacaatctccctagaca

SEQ ID NO: 408395 - DNA, 20 bp, Artificial Sequence
  Description of Artificial Sequence: Synthetic oligonucleotide
  Target: LAMA2; (+) strand; PAM type: YTN; PAM sequence: TTA
gggacaatctccctagacat

SEQ ID NO: 408396 - DNA, 20 bp, Artificial Sequence
  Description of Artificial Sequence: Synthetic oligonucleotide
  Target: LAMA2; (+) strand; PAM type: YTN; PAM sequence: CTC
cctagacatgtacctgcttg

SEQ ID NO: 408397 - DNA, 20 bp, Artificial Sequence
  Description of Artificial Sequence: Synthetic oligonucleotide
  Target: LAMA2; (+) strand; PAM type: YTN; PAM sequence: CTA
gacatgtacctgcttgtgtg

SEQ ID NO: 408398 - DNA, 20 bp, Artificial Sequence
  Description of Artificial Sequence: Synthetic oligonucleotide
  Target: LAMA2; (+) strand; PAM type: YTN; PAM sequence: CTG
cttgtgtgtcagtttgactt

SEQ ID NO: 408399 - DNA, 20 bp, Artificial Sequence
  Description of Artificial Sequence: Synthetic oligonucleotide
  Target: LAMA2; (+) strand; PAM type: YTN; PAM sequence: CTT
gtgtgtcagtttgacttaaa

SEQ ID NO: 408400 - DNA, 20 bp, Artificial Sequence
  Description of Artificial Sequence: Synthetic oligonucleotide
  Target: LAMA2; (+) strand; PAM type: YTN; PAM sequence: TTG
tgtgtcagtttgacttaaat

SEQ ID NO: 408401 - DNA, 20 bp, Artificial Sequence
  Description of Artificial Sequence: Synthetic oligonucleotide
  Target: LAMA2; (+) strand; PAM type: YTN; PAM sequence: TTT
gacttaaatctttggtttaa

SEQ ID NO: 408402 - DNA, 20 bp, Artificial Sequence
  Description of Artificial Sequence: Synthetic oligonucleotide
  Target: LAMA2; (+) strand; PAM type: YTN; PAM sequence: TTG
acttaaatctttggtttaaa

SEQ ID NO: 408403 - DNA, 20 bp, Artificial Sequence
  Description of Artificial Sequence: Synthetic oligonucleotide
  Target: LAMA2; (+) strand; PAM type: YTN; PAM sequence: CTT
aaatctttggtttaaacaac

SEQ ID NO: 408404 - DNA, 20 bp, Artificial Sequence
  Description of Artificial Sequence: Synthetic oligonucleotide
  Target: LAMA2; (+) strand; PAM type: YTN; PAM sequence: TTA
aatctttggtttaaacaaca

SEQ ID NO: 408405 - DNA, 20 bp, Artificial Sequence
  Description of Artificial Sequence: Synthetic oligonucleotide
  Target: LAMA2; (+) strand; PAM type: YTN; PAM sequence: CTT
tggtttaaacaacaacaaca

SEQ ID NO: 408406 - DNA, 20 bp, Artificial Sequence
  Description of Artificial Sequence: Synthetic oligonucleotide
  Target: LAMA2; (+) strand; PAM type: YTN; PAM sequence: TTT
ggtttaaacaacaacaacaa

SEQ ID NO: 408407 - DNA, 20 bp, Artificial Sequence
  Description of Artificial Sequence: Synthetic oligonucleotide
  Target: LAMA2; (+) strand; PAM type: YTN; PAM sequence: TTG
gtttaaacaacaacaacaaa

SEQ ID NO: 408408 - DNA, 20 bp, Artificial Sequence
  Description of Artificial Sequence: Synthetic oligonucleotide
  Target: LAMA2; (+) strand; PAM type: YTN; PAM sequence: TTT
aaacaacaacaacaaaaaaa

SEQ ID NO: 408409 - DNA, 20 bp, Artificial Sequence
  Description of Artificial Sequence: Synthetic oligonucleotide
  Target: LAMA2; (+) strand; PAM type: YTN; PAM sequence: TTA
aacaacaacaacaaaaaaag

SEQ ID NO: 408410 - DNA, 20 bp, Artificial Sequence
  Description of Artificial Sequence: Synthetic oligonucleotide
  Target: LAMA2; (+) strand; PAM type: YTN; PAM sequence: CTA
acagtgataatcttctatat

SEQ ID NO: 408411 - DNA, 20 bp, Artificial Sequence
  Description of Artificial Sequence: Synthetic oligonucleotide
  Target: LAMA2; (+) strand; PAM type: YTN; PAM sequence: CTT
ctatatttaaaatcaaaagc

SEQ ID NO: 408412 - DNA, 20 bp, Artificial Sequence
  Description of Artificial Sequence: Synthetic oligonucleotide
  Target: LAMA2; (+) strand; PAM type: YTN; PAM sequence: TTC
tatatttaaaatcaaaagct

SEQ ID NO: 408413 - DNA, 20 bp, Artificial Sequence
  Description of Artificial Sequence: Synthetic oligonucleotide
  Target: LAMA2; (+) strand; PAM type: YTN; PAM sequence: CTA
tatttaaaatcaaaagctct

SEQ ID NO: 408414 - DNA, 20 bp, Artificial Sequence
  Description of Artificial Sequence: Synthetic oligonucleotide
  Target: LAMA2; (+) strand; PAM type: YTN; PAM sequence: TTT
aaaatcaaaagctctagaat

SEQ ID NO: 408415 - DNA, 20 bp, Artificial Sequence
  Description of Artificial Sequence: Synthetic oligonucleotide
  Target: LAMA2; (+) strand; PAM type: YTN; PAM sequence: TTA
aaatcaaaagctctagaata

SEQ ID NO: 408416 - DNA, 20 bp, Artificial Sequence
  Description of Artificial Sequence: Synthetic oligonucleotide
  Target: LAMA2; (+) strand; PAM type: YTN; PAM sequence: CTC
tagaataaaagtagaggcta

SEQ ID NO: 408417 - DNA, 20 bp, Artificial Sequence
  Description of Artificial Sequence: Synthetic oligonucleotide
  Target: LAMA2; (+) strand; PAM type: YTN; PAM sequence: CTA
gaataaaagtagaggctata

SEQ ID NO: 408418 - DNA, 20 bp, Artificial Sequence
  Description of Artificial Sequence: Synthetic oligonucleotide
  Target: LAMA2; (+) strand; PAM type: YTN; PAM sequence: CTA
taattctgattttaacaaaa

SEQ ID NO: 408419 - DNA, 20 bp, Artificial Sequence
  Description of Artificial Sequence: Synthetic oligonucleotide
  Target: LAMA2; (+) strand; PAM type: YTN; PAM sequence: TTC
tgattttaacaaaaactgct

SEQ ID NO: 408420 - DNA, 20 bp, Artificial Sequence
  Description of Artificial Sequence: Synthetic oligonucleotide
  Target: LAMA2; (+) strand; PAM type: YTN; PAM sequence: CTG
attttaacaaaaactgctca

SEQ ID NO: 408421 - DNA, 20 bp, Artificial Sequence
  Description of Artificial Sequence: Synthetic oligonucleotide
  Target: LAMA2; (+) strand; PAM type: YTN; PAM sequence: TTT
taacaaaaactgctcagaag

SEQ ID NO: 408422 - DNA, 20 bp, Artificial Sequence
  Description of Artificial Sequence: Synthetic oligonucleotide
  Target: LAMA2; (+) strand; PAM type: YTN; PAM sequence: TTT
aacaaaaactgctcagaaga

SEQ ID NO: 408423 - DNA, 20 bp, Artificial Sequence
  Description of Artificial Sequence: Synthetic oligonucleotide
  Target: LAMA2; (+) strand; PAM type: YTN; PAM sequence: TTA
acaaaaactgctcagaagat

SEQ ID NO: 408424 - DNA, 20 bp, Artificial Sequence
  Description of Artificial Sequence: Synthetic oligonucleotide
  Target: LAMA2; (+) strand; PAM type: YTN; PAM sequence: CTG
ctcagaagatttgaagttat

SEQ ID NO: 408425 - DNA, 20 bp, Artificial Sequence
  Description of Artificial Sequence: Synthetic oligonucleotide
  Target: LAMA2; (+) strand; PAM type: YTN; PAM sequence: CTC
agaagatttgaagttatcat

SEQ ID NO: 408426 - DNA, 20 bp, Artificial Sequence
  Description of Artificial Sequence: Synthetic oligonucleotide
  Target: LAMA2; (+) strand; PAM type: YTN; PAM sequence: TTT
gaagttatcatataactaga

SEQ ID NO: 408427 - DNA, 20 bp, Artificial Sequence
  Description of Artificial Sequence: Synthetic oligonucleotide
  Target: LAMA2; (+) strand; PAM type: YTN; PAM sequence: TTG
aagttatcatataactagaa

SEQ ID NO: 408428 - DNA, 20 bp, Artificial Sequence
  Description of Artificial Sequence: Synthetic oligonucleotide
  Target: LAMA2; (+) strand; PAM type: YTN; PAM sequence: TTA
tcatataactagaaataata

SEQ ID NO: 408429 - DNA, 20 bp, Artificial Sequence
  Description of Artificial Sequence: Synthetic oligonucleotide
  Target: LAMA2; (+) strand; PAM type: YTN; PAM sequence: CTA
gaaataatatttcttcaact

SEQ ID NO: 408430 - DNA, 20 bp, Artificial Sequence
  Description of Artificial Sequence: Synthetic oligonucleotide
  Target: LAMA2; (+) strand; PAM type: YTN; PAM sequence: TTT
cttcaactgctcttaaactt

SEQ ID NO: 408431 - DNA, 20 bp, Artificial Sequence
  Description of Artificial Sequence: Synthetic oligonucleotide
  Target: LAMA2; (+) strand; PAM type: YTN; PAM sequence: TTC
ttcaactgctcttaaacttt

SEQ ID NO: 408432 - DNA, 20 bp, Artificial Sequence
  Description of Artificial Sequence: Synthetic oligonucleotide
  Target: LAMA2; (+) strand; PAM type: YTN; PAM sequence: CTT
caactgctcttaaactttcc

SEQ ID NO: 408433 - DNA, 20 bp, Artificial Sequence
  Description of Artificial Sequence: Synthetic oligonucleotide
  Target: LAMA2; (+) strand; PAM type: YTN; PAM sequence: TTC
aactgctcttaaactttcca

SEQ ID NO: 408434 - DNA, 20 bp, Artificial Sequence
  Description of Artificial Sequence: Synthetic oligonucleotide
  Target: LAMA2; (+) strand; PAM type: YTN; PAM sequence: CTG
ctcttaaactttccatgttt

SEQ ID NO: 408435 - DNA, 20 bp, Artificial Sequence
  Description of Artificial Sequence: Synthetic oligonucleotide
  Target: LAMA2; (+) strand; PAM type: YTN; PAM sequence: CTC
ttaaactttccatgttttcc

SEQ ID NO: 408436 - DNA, 20 bp, Artificial Sequence
  Description of Artificial Sequence: Synthetic oligonucleotide
  Target: LAMA2; (+) strand; PAM type: YTN; PAM sequence: CTT
aaactttccatgttttcctg

SEQ ID NO: 408437 - DNA, 20 bp, Artificial Sequence
  Description of Artificial Sequence: Synthetic oligonucleotide
  Target: LAMA2; (+) strand; PAM type: YTN; PAM sequence: TTA
aactttccatgttttcctgc

SEQ ID NO: 408438 - DNA, 20 bp, Artificial Sequence
  Description of Artificial Sequence: Synthetic oligonucleotide
  Target: LAMA2; (+) strand; PAM type: YTN; PAM sequence: CTT
tccatgttttcctgctttct

SEQ ID NO: 408439 - DNA, 20 bp, Artificial Sequence
  Description of Artificial Sequence: Synthetic oligonucleotide
  Target: LAMA2; (+) strand; PAM type: YTN; PAM sequence: TTT
ccatgttttcctgctttcta

SEQ ID NO: 408440 - DNA, 20 bp, Artificial Sequence
  Description of Artificial Sequence: Synthetic oligonucleotide
  Target: LAMA2; (+) strand; PAM type: YTN; PAM sequence: TTC
catgttttcctgctttctaa

SEQ ID NO: 408441 - DNA, 20 bp, Artificial Sequence
  Description of Artificial Sequence: Synthetic oligonucleotide
  Target: LAMA2; (+) strand; PAM type: YTN; PAM sequence: TTT
tcctgctttctaaacctatg

SEQ ID NO: 408442 - DNA, 20 bp, Artificial Sequence
  Description of Artificial Sequence: Synthetic oligonucleotide
  Target: LAMA2; (+) strand; PAM type: YTN; PAM sequence: TTT
cctgctttctaaacctatga

SEQ ID NO: 408443 - DNA, 20 bp, Artificial Sequence
  Description of Artificial Sequence: Synthetic oligonucleotide
  Target: LAMA2; (+) strand; PAM type: YTN; PAM sequence: TTC
ctgctttctaaacctatgat

SEQ ID NO: 408444 - DNA, 20 bp, Artificial Sequence
  Description of Artificial Sequence: Synthetic oligonucleotide
  Target: LAMA2; (+) strand; PAM type: YTN; PAM sequence: CTG
ctttctaaacctatgatgta

SEQ ID NO: 408445 - DNA, 20 bp, Artificial Sequence
  Description of Artificial Sequence: Synthetic oligonucleotide
  Target: LAMA2; (+) strand; PAM type: YTN; PAM sequence: CTT
tctaaacctatgatgtattt

SEQ ID NO: 408446 - DNA, 20 bp, Artificial Sequence
  Description of Artificial Sequence: Synthetic oligonucleotide
  Target: LAMA2; (+) strand; PAM type: YTN; PAM sequence: TTT
ctaaacctatgatgtatttc

SEQ ID NO: 408447 - DNA, 20 bp, Artificial Sequence
  Description of Artificial Sequence: Synthetic oligonucleotide
  Target: LAMA2; (+) strand; PAM type: YTN; PAM sequence: TTC
taaacctatgatgtatttca

SEQ ID NO: 408448 - DNA, 20 bp, Artificial Sequence
  Description of Artificial Sequence: Synthetic oligonucleotide
  Target: LAMA2; (+) strand; PAM type: YTN; PAM sequence: CTA
aacctatgatgtatttcata

SEQ ID NO: 408449 - DNA, 20 bp, Artificial Sequence
  Description of Artificial Sequence: Synthetic oligonucleotide
  Target: LAMA2; (+) strand; PAM type: YTN; PAM sequence: CTA
tgatgtatttcataatcaca

SEQ ID NO: 408450 - DNA, 20 bp, Artificial Sequence
  Description of Artificial Sequence: Synthetic oligonucleotide
  Target: LAMA2; (+) strand; PAM type: YTN; PAM sequence: TTT
cataatcacattaattgcat

SEQ ID NO: 408451 - DNA, 20 bp, Artificial Sequence
  Description of Artificial Sequence: Synthetic oligonucleotide
  Target: LAMA2; (+) strand; PAM type: YTN; PAM sequence: TTC
ataatcacattaattgcatc

SEQ ID NO: 408452 - DNA, 20 bp, Artificial Sequence
  Description of Artificial Sequence: Synthetic oligonucleotide
  Target: LAMA2; (+) strand; PAM type: YTN; PAM sequence: TTA
attgcatcgaggagggtgag

SEQ ID NO: 408453 - DNA, 20 bp, Artificial Sequence
  Description of Artificial Sequence: Synthetic oligonucleotide
  Target: LAMA2; (+) strand; PAM type: YTN; PAM sequence: TTG
catcgaggagggtgagtgag

SEQ ID NO: 408454 - DNA, 20 bp, Artificial Sequence
  Description of Artificial Sequence: Synthetic oligonucleotide
  Target: LAMA2; (+) strand; PAM type: YTN; PAM sequence: CTT
atttaaattttcatttctaa

SEQ ID NO: 408455 - DNA, 20 bp, Artificial Sequence
  Description of Artificial Sequence: Synthetic oligonucleotide
  Target: LAMA2; (+) strand; PAM type: YTN; PAM sequence: TTA
tttaaattttcatttctaat

SEQ ID NO: 408456 - DNA, 20 bp, Artificial Sequence
  Description of Artificial Sequence: Synthetic oligonucleotide
  Target: LAMA2; (+) strand; PAM type: YTN; PAM sequence: TTT
aaattttcatttctaatggt

SEQ ID NO: 408457 - DNA, 20 bp, Artificial Sequence
  Description of Artificial Sequence: Synthetic oligonucleotide
  Target: LAMA2; (+) strand; PAM type: YTN; PAM sequence: TTA
aattttcatttctaatggtt

SEQ ID NO: 408458 - DNA, 20 bp, Artificial Sequence
  Description of Artificial Sequence: Synthetic oligonucleotide
  Target: LAMA2; (+) strand; PAM type: YTN; PAM sequence: TTT
tcatttctaatggtttctac

SEQ ID NO: 408459 - DNA, 20 bp, Artificial Sequence
  Description of Artificial Sequence: Synthetic oligonucleotide
  Target: LAMA2; (+) strand; PAM type: YTN; PAM sequence: TTT
catttctaatggtttctact

SEQ ID NO: 408460 - DNA, 20 bp, Artificial Sequence
  Description of Artificial Sequence: Synthetic oligonucleotide
  Target: LAMA2; (+) strand; PAM type: YTN; PAM sequence: TTC
atttctaatggtttctactc

SEQ ID NO: 408461 - DNA, 20 bp, Artificial Sequence
  Description of Artificial Sequence: Synthetic oligonucleotide
  Target: LAMA2; (+) strand; PAM type: YTN; PAM sequence: TTT
ctaatggtttctactcttct

SEQ ID NO: 408462 - DNA, 20 bp, Artificial Sequence
  Description of Artificial Sequence: Synthetic oligonucleotide
  Target: LAMA2; (+) strand; PAM type: YTN; PAM sequence: TTC
taatggtttctactcttctt

SEQ ID NO: 408463 - DNA, 20 bp, Artificial Sequence
  Description of Artificial Sequence: Synthetic oligonucleotide
  Target: LAMA2; (+) strand; PAM type: YTN; PAM sequence: CTA
atggtttctactcttctttt

SEQ ID NO: 408464 - DNA, 20 bp, Artificial Sequence
  Description of Artificial Sequence: Synthetic oligonucleotide
  Target: LAMA2; (+) strand; PAM type: YTN; PAM sequence: TTT
ctactcttcttttcctttac

SEQ ID NO: 408465 - DNA, 20 bp, Artificial Sequence
  Description of Artificial Sequence: Synthetic oligonucleotide
  Target: LAMA2; (+) strand; PAM type: YTN; PAM sequence: TTC
tactcttcttttcctttact

SEQ ID NO: 408466 - DNA, 20 bp, Artificial Sequence
  Description of Artificial Sequence: Synthetic oligonucleotide
  Target: LAMA2; (+) strand; PAM type: YTN; PAM sequence: CTA
ctcttcttttcctttactca

SEQ ID NO: 408467 - DNA, 20 bp, Artificial Sequence
  Description of Artificial Sequence: Synthetic oligonucleotide
  Target: LAMA2; (+) strand; PAM type: YTN; PAM sequence: CTC
ttcttttcctttactcacag

SEQ ID NO: 408468 - DNA, 20 bp, Artificial Sequence
  Description of Artificial Sequence: Synthetic oligonucleotide
  Target: LAMA2; (+) strand; PAM type: YTN; PAM sequence: CTT
cttttcctttactcacagaa

SEQ ID NO: 408469 - DNA, 20 bp, Artificial Sequence
  Description of Artificial Sequence: Synthetic oligonucleotide
  Target: LAMA2; (+) strand; PAM type: YTN; PAM sequence: TTC
ttttcctttactcacagaat

SEQ ID NO: 408470 - DNA, 20 bp, Artificial Sequence
  Description of Artificial Sequence: Synthetic oligonucleotide
  Target: LAMA2; (+) strand; PAM type: YTN; PAM sequence: CTT
ttcctttactcacagaatgt

SEQ ID NO: 408471 - DNA, 20 bp, Artificial Sequence
  Description of Artificial Sequence: Synthetic oligonucleotide
  Target: LAMA2; (+) strand; PAM type: YTN; PAM sequence: TTT
tcctttactcacagaatgtt

SEQ ID NO: 408472 - DNA, 20 bp, Artificial Sequence
  Description of Artificial Sequence: Synthetic oligonucleotide
  Target: LAMA2; (+) strand; PAM type: YTN; PAM sequence: TTT
cctttactcacagaatgttt

SEQ ID NO: 408473 - DNA, 20 bp, Artificial Sequence
  Description of Artificial Sequence: Synthetic oligonucleotide
  Target: LAMA2; (+) strand; PAM type: YTN; PAM sequence: TTC
ctttactcacagaatgttta

SEQ ID NO: 408474 - DNA, 20 bp, Artificial Sequence
  Description of Artificial Sequence: Synthetic oligonucleotide
  Target: LAMA2; (+) strand; PAM type: YTN; PAM sequence: CTT
tactcacagaatgtttacac

SEQ ID NO: 408475 - DNA, 20 bp, Artificial Sequence
  Description of Artificial Sequence: Synthetic oligonucleotide
  Target: LAMA2; (+) strand; PAM type: YTN; PAM sequence: TTT
actcacagaatgtttacaca

SEQ ID NO: 408476 - DNA, 20 bp, Artificial Sequence
  Description of Artificial Sequence: Synthetic oligonucleotide
  Target: LAMA2; (+) strand; PAM type: YTN; PAM sequence: TTA
ctcacagaatgtttacacag

SEQ ID NO: 408477 - DNA, 20 bp, Artificial Sequence
  Description of Artificial Sequence: Synthetic oligonucleotide
  Target: LAMA2; (+) strand; PAM type: YTN; PAM sequence: CTC
acagaatgtttacacagtta

SEQ ID NO: 408478 - DNA, 20 bp, Artificial Sequence
  Description of Artificial Sequence: Synthetic oligonucleotide
  Target: LAMA2; (+) strand; PAM type: YTN; PAM sequence: TTT
acacagttagctttcctaag

SEQ ID NO: 408479 - DNA, 20 bp, Artificial Sequence
  Description of Artificial Sequence: Synthetic oligonucleotide
  Target: LAMA2; (+) strand; PAM type: YTN; PAM sequence: TTA
cacagttagctttcctaagc

SEQ ID NO: 408480 - DNA, 20 bp, Artificial Sequence
  Description of Artificial Sequence: Synthetic oligonucleotide
  Target: LAMA2; (+) strand; PAM type: YTN; PAM sequence: TTA
gctttcctaagcctggtttt

SEQ ID NO: 408481 - DNA, 20 bp, Artificial Sequence
  Description of Artificial Sequence: Synthetic oligonucleotide
  Target: LAMA2; (+) strand; PAM type: YTN; PAM sequence: CTT
tcctaagcctggttttgtgg

SEQ ID NO: 408482 - DNA, 20 bp, Artificial Sequence
  Description of Artificial Sequence: Synthetic oligonucleotide
  Target: LAMA2; (+) strand; PAM type: YTN; PAM sequence: TTT
cctaagcctggttttgtgga

SEQ ID NO: 408483 - DNA, 20 bp, Artificial Sequence
  Description of Artificial Sequence: Synthetic oligonucleotide
  Target: LAMA2; (+) strand; PAM type: YTN; PAM sequence: TTC
ctaagcctggttttgtggag

SEQ ID NO: 408484 - DNA, 20 bp, Artificial Sequence
  Description of Artificial Sequence: Synthetic oligonucleotide
  Target: LAMA2; (+) strand; PAM type: YTN; PAM sequence: CTA
agcctggttttgtggagctc

SEQ ID NO: 408485 - DNA, 20 bp, Artificial Sequence
  Description of Artificial Sequence: Synthetic oligonucleotide
  Target: LAMA2; (+) strand; PAM type: YTN; PAM sequence: CTG
gttttgtggagctctcccct

SEQ ID NO: 408486 - DNA, 20 bp, Artificial Sequence
  Description of Artificial Sequence: Synthetic oligonucleotide
  Target: LAMA2; (+) strand; PAM type: YTN; PAM sequence: TTT
tgtggagctctcccctgtgc

SEQ ID NO: 408487 - DNA, 20 bp, Artificial Sequence
  Description of Artificial Sequence: Synthetic oligonucleotide
  Target: LAMA2; (+) strand; PAM type: YTN; PAM sequence: TTT
gtggagctctcccctgtgcc

SEQ ID NO: 408488 - DNA, 20 bp, Artificial Sequence
  Description of Artificial Sequence: Synthetic oligonucleotide
  Target: LAMA2; (+) strand; PAM type: YTN; PAM sequence: TTG
tggagctctcccctgtgcca

SEQ ID NO: 408489 - DNA, 20 bp, Artificial Sequence
  Description of Artificial Sequence: Synthetic oligonucleotide
  Target: LAMA2; (+) strand; PAM type: YTN; PAM sequence: CTC
tcccctgtgccaattgatgt

SEQ ID NO: 408490 - DNA, 20 bp, Artificial Sequence
  Description of Artificial Sequence: Synthetic oligonucleotide
  Target: LAMA2; (+) strand; PAM type: YTN; PAM sequence: CTC
ccctgtgccaattgatgtag

SEQ ID NO: 408491 - DNA, 20 bp, Artificial Sequence
  Description of Artificial Sequence: Synthetic oligonucleotide
  Target: LAMA2; (+) strand; PAM type: YTN; PAM sequence: CTG
tgccaattgatgtaggaaca

SEQ ID NO: 408492 - DNA, 20 bp, Artificial Sequence
  Description of Artificial Sequence: Synthetic oligonucleotide
  Target: LAMA2; (+) strand; PAM type: YTN; PAM sequence: TTG
atgtaggaacagaaatcaac

SEQ ID NO: 408493 - DNA, 20 bp, Artificial Sequence
  Description of Artificial Sequence: Synthetic oligonucleotide
  Target: LAMA2; (+) strand; PAM type: YTN; PAM sequence: CTG
tcattcagcaccaagaatga

SEQ ID NO: 408494 - DNA, 20 bp, Artificial Sequence
  Description of Artificial Sequence: Synthetic oligonucleotide
  Target: LAMA2; (+) strand; PAM type: YTN; PAM sequence: TTC
agcaccaagaatgagtccgg

SEQ ID NO: 408495 - DNA, 20 bp, Artificial Sequence
  Description of Artificial Sequence: Synthetic oligonucleotide
  Target: LAMA2; (+) strand; PAM type: YTN; PAM sequence: TTC
ttttgggaagtggagggaca

SEQ ID NO: 408496 - DNA, 20 bp, Artificial Sequence
  Description of Artificial Sequence: Synthetic oligonucleotide
  Target: LAMA2; (+) strand; PAM type: YTN; PAM sequence: CTT
ttgggaagtggagggacacc

SEQ ID NO: 408497 - DNA, 20 bp, Artificial Sequence
  Description of Artificial Sequence: Synthetic oligonucleotide
  Target: LAMA2; (+) strand; PAM type: YTN; PAM sequence: TTT
tgggaagtggagggacacca

SEQ ID NO: 408498 - DNA, 20 bp, Artificial Sequence
  Description of Artificial Sequence: Synthetic oligonucleotide
  Target: LAMA2; (+) strand; PAM type: YTN; PAM sequence: TTT
gggaagtggagggacaccag

SEQ ID NO: 408499 - DNA, 20 bp, Artificial Sequence
  Description of Artificial Sequence: Synthetic oligonucleotide
  Target: LAMA2; (+) strand; PAM type: YTN; PAM sequence: TTG
ggaagtggagggacaccagc

SEQ ID NO: 408500 - DNA, 20 bp, Artificial Sequence
  Description of Artificial Sequence: Synthetic oligonucleotide
  Target: LAMA2; (+) strand; PAM type: YTN; PAM sequence: CTA
ggagaaaacgaaggcagact

SEQ ID NO: 408501 - DNA, 20 bp, Artificial Sequence
  Description of Artificial Sequence: Synthetic oligonucleotide
  Target: LAMA2; (+) strand; PAM type: YTN; PAM sequence: CTG
gacaggtaccctcacaccta

SEQ ID NO: 408502 - DNA, 20 bp, Artificial Sequence
  Description of Artificial Sequence: Synthetic oligonucleotide
  Target: LAMA2; (+) strand; PAM type: YTN; PAM sequence: CTC
acacctagctgataatgcat

SEQ ID NO: 408503 - DNA, 20 bp, Artificial Sequence
  Description of Artificial Sequence: Synthetic oligonucleotide
  Target: LAMA2; (+) strand; PAM type: YTN; PAM sequence: CTA
gctgataatgcattttccct

SEQ ID NO: 408504 - DNA, 20 bp, Artificial Sequence
  Description of Artificial Sequence: Synthetic oligonucleotide
  Target: LAMA2; (+) strand; PAM type: YTN; PAM sequence: CTG
ataatgcattttccctaatg

SEQ ID NO: 408505 - DNA, 20 bp, Artificial Sequence
  Description of Artificial Sequence: Synthetic oligonucleotide
  Target: LAMA2; (+) strand; PAM type: YTN; PAM sequence: TTT
tccctaatgcttatataaag

SEQ ID NO: 408506 - DNA, 20 bp, Artificial Sequence
  Description of Artificial Sequence: Synthetic oligonucleotide
  Target: LAMA2; (+) strand; PAM type: YTN; PAM sequence: TTT
ccctaatgcttatataaagc

SEQ ID NO: 408507 - DNA, 20 bp, Artificial Sequence
  Description of Artificial Sequence: Synthetic oligonucleotide
  Target: LAMA2; (+) strand; PAM type: YTN; PAM sequence: TTC
cctaatgcttatataaagca

SEQ ID NO: 408508 - DNA, 20 bp, Artificial Sequence
  Description of Artificial Sequence: Synthetic oligonucleotide
  Target: LAMA2; (+) strand; PAM type: YTN; PAM sequence: CTA
atgcttatataaagcagtta

SEQ ID NO: 408509 - DNA, 20 bp, Artificial Sequence
  Description of Artificial Sequence: Synthetic oligonucleotide
  Target: LAMA2; (+) strand; PAM type: YTN; PAM sequence: CTT
atataaagcagttaacttac

SEQ ID NO: 408510 - DNA, 20 bp, Artificial Sequence
  Description of Artificial Sequence: Synthetic oligonucleotide
  Target: LAMA2; (+) strand; PAM type: YTN; PAM sequence: TTA
tataaagcagttaacttact

SEQ ID NO: 408511 - DNA, 20 bp, Artificial Sequence
  Description of Artificial Sequence: Synthetic oligonucleotide
  Target: LAMA2; (+) strand; PAM type: YTN; PAM sequence: TTA
acttacttttgtatttttag

SEQ ID NO: 408512 - DNA, 20 bp, Artificial Sequence
  Description of Artificial Sequence: Synthetic oligonucleotide
  Target: LAMA2; (+) strand; PAM type: YTN; PAM sequence: CTT
acttttgtatttttagtttc

SEQ ID NO: 408513 - DNA, 20 bp, Artificial Sequence
  Description of Artificial Sequence: Synthetic oligonucleotide
  Target: LAMA2; (+) strand; PAM type: YTN; PAM sequence: TTA
cttttgtatttttagtttcg

SEQ ID NO: 408514 - DNA, 20 bp, Artificial Sequence
  Description of Artificial Sequence: Synthetic oligonucleotide
  Target: LAMA2; (+) strand; PAM type: YTN; PAM sequence: CTT
ttgtatttttagtttcgtat

SEQ ID NO: 408515 - DNA, 20 bp, Artificial Sequence
  Description of Artificial Sequence: Synthetic oligonucleotide
  Target: LAMA2; (+) strand; PAM type: YTN; PAM sequence: TTT
tgtatttttagtttcgtatc

SEQ ID NO: 408516 - DNA, 20 bp, Artificial Sequence
  Description of Artificial Sequence: Synthetic oligonucleotide
  Target: LAMA2; (+) strand; PAM type: YTN; PAM sequence: TTT
gtatttttagtttcgtatca

SEQ ID NO: 408517 - DNA, 20 bp, Artificial Sequence
  Description of Artificial Sequence: Synthetic oligonucleotide
  Target: LAMA2; (+) strand; PAM type: YTN; PAM sequence: TTG
tatttttagtttcgtatcat

SEQ ID NO: 408518 - DNA, 20 bp, Artificial Sequence
  Description of Artificial Sequence: Synthetic oligonucleotide
  Target: LAMA2; (+) strand; PAM type: YTN; PAM sequence: TTT
ttagtttcgtatcatttatt

SEQ ID NO: 408519 - DNA, 20 bp, Artificial Sequence
  Description of Artificial Sequence: Synthetic oligonucleotide
  Target: LAMA2; (+) strand; PAM type: YTN; PAM sequence: TTT
tagtttcgtatcatttattt

SEQ ID NO: 408520 - DNA, 20 bp, Artificial Sequence
  Description of Artificial Sequence: Synthetic oligonucleotide
  Target: LAMA2; (+) strand; PAM type: YTN; PAM sequence: TTT
agtttcgtatcatttatttc

SEQ ID NO: 408521 - DNA, 20 bp, Artificial Sequence
  Description of Artificial Sequence: Synthetic oligonucleotide
  Target: LAMA2; (+) strand; PAM type: YTN; PAM sequence: TTA
gtttcgtatcatttatttct

SEQ ID NO: 408522 - DNA, 20 bp, Artificial Sequence
  Description of Artificial Sequence: Synthetic oligonucleotide
  Target: LAMA2; (+) strand; PAM type: YTN; PAM sequence: TTT
cgtatcatttatttctgctc

SEQ ID NO: 408523 - DNA, 20 bp, Artificial Sequence
  Description of Artificial Sequence: Synthetic oligonucleotide
  Target: LAMA2; (+) strand; PAM type: YTN; PAM sequence: TTC
gtatcatttatttctgctct

SEQ ID NO: 408524 - DNA, 20 bp, Artificial Sequence
  Description of Artificial Sequence: Synthetic oligonucleotide
  Target: LAMA2; (+) strand; PAM type: YTN; PAM sequence: TTT
atttctgctctcatcttggc

SEQ ID NO: 408525 - DNA, 20 bp, Artificial Sequence
  Description of Artificial Sequence: Synthetic oligonucleotide
  Target: LAMA2; (+) strand; PAM type: YTN; PAM sequence: TTA
tttctgctctcatcttggct

SEQ ID NO: 408526 - DNA, 20 bp, Artificial Sequence
  Description of Artificial Sequence: Synthetic oligonucleotide
  Target: LAMA2; (+) strand; PAM type: YTN; PAM sequence: TTT
ctgctctcatcttggctagc

SEQ ID NO: 408527 - DNA, 20 bp, Artificial Sequence
  Description of Artificial Sequence: Synthetic oligonucleotide
  Target: LAMA2; (+) strand; PAM type: YTN; PAM sequence: TTC
tgctctcatcttggctagca

SEQ ID NO: 408528 - DNA, 20 bp, Artificial Sequence
  Description of Artificial Sequence: Synthetic oligonucleotide
  Target: LAMA2; (+) strand; PAM type: YTN; PAM sequence: CTG
ctctcatcttggctagcaag

SEQ ID NO: 408529 - DNA, 20 bp, Artificial Sequence
  Description of Artificial Sequence: Synthetic oligonucleotide
  Target: LAMA2; (+) strand; PAM type: YTN; PAM sequence: CTC
tcatcttggctagcaaggac

SEQ ID NO: 408530 - DNA, 20 bp, Artificial Sequence
  Description of Artificial Sequence: Synthetic oligonucleotide
  Target: LAMA2; (+) strand; PAM type: YTN; PAM sequence: CTC
atcttggctagcaaggactg

SEQ ID NO: 408531 - DNA, 20 bp, Artificial Sequence
  Description of Artificial Sequence: Synthetic oligonucleotide
  Target: LAMA2; (+) strand; PAM type: YTN; PAM sequence: CTT
ggctagcaaggactgaacat

SEQ ID NO: 408532 - DNA, 20 bp, Artificial Sequence
  Description of Artificial Sequence: Synthetic oligonucleotide
  Target: LAMA2; (+) strand; PAM type: YTN; PAM sequence: TTG
gctagcaaggactgaacatt

SEQ ID NO: 408533 - DNA, 20 bp, Artificial Sequence
  Description of Artificial Sequence: Synthetic oligonucleotide
  Target: LAMA2; (+) strand; PAM type: YTN; PAM sequence: CTA
gcaaggactgaacattccat

SEQ ID NO: 408534 - DNA, 20 bp, Artificial Sequence
  Description of Artificial Sequence: Synthetic oligonucleotide
  Target: LAMA2; (+) strand; PAM type: YTN; PAM sequence: CTG
aacattccatatttccatgc

SEQ ID NO: 408535 - DNA, 20 bp, Artificial Sequence
  Description of Artificial Sequence: Synthetic oligonucleotide
  Target: LAMA2; (+) strand; PAM type: YTN; PAM sequence: TTC
catatttccatgctggcctc

SEQ ID NO: 408536 - DNA, 20 bp, Artificial Sequence
  Description of Artificial Sequence: Synthetic oligonucleotide
  Target: LAMA2; (+) strand; PAM type: YTN; PAM sequence: TTT
ccatgctggcctcctatttc

SEQ ID NO: 408537 - DNA, 20 bp, Artificial Sequence
  Description of Artificial Sequence: Synthetic oligonucleotide
  Target: LAMA2; (+) strand; PAM type: YTN; PAM sequence: TTC
catgctggcctcctatttca

SEQ ID NO: 408538 - DNA, 20 bp, Artificial Sequence
  Description of Artificial Sequence: Synthetic oligonucleotide
  Target: LAMA2; (+) strand; PAM type: YTN; PAM sequence: CTG
gcctcctatttcactcacat

SEQ ID NO: 408539 - DNA, 20 bp, Artificial Sequence
  Description of Artificial Sequence: Synthetic oligonucleotide
  Target: LAMA2; (+) strand; PAM type: YTN; PAM sequence: CTC
ctatttcactcacatcatct

SEQ ID NO: 408540 - DNA, 20 bp, Artificial Sequence
  Description of Artificial Sequence: Synthetic oligonucleotide
  Target: LAMA2; (+) strand; PAM type: YTN; PAM sequence: CTA
tttcactcacatcatctccc

SEQ ID NO: 408541 - DNA, 20 bp, Artificial Sequence
  Description of Artificial Sequence: Synthetic oligonucleotide
  Target: LAMA2; (+) strand; PAM type: YTN; PAM sequence: TTT
cactcacatcatctccccag

SEQ ID NO: 408542 - DNA, 20 bp, Artificial Sequence
  Description of Artificial Sequence: Synthetic oligonucleotide
  Target: LAMA2; (+) strand; PAM type: YTN; PAM sequence: TTC
actcacatcatctccccagg

SEQ ID NO: 408543 - DNA, 20 bp, Artificial Sequence
  Description of Artificial Sequence: Synthetic oligonucleotide
  Target: LAMA2; (+) strand; PAM type: YTN; PAM sequence: CTC
acatcatctccccaggacaa

SEQ ID NO: 408544 - DNA, 20 bp, Artificial Sequence
  Description of Artificial Sequence: Synthetic oligonucleotide
  Target: LAMA2; (+) strand; PAM type: YTN; PAM sequence: CTC
cccaggacaattgtcttctc

SEQ ID NO: 408545 - DNA, 20 bp, Artificial Sequence
  Description of Artificial Sequence: Synthetic oligonucleotide
  Target: LAMA2; (+) strand; PAM type: YTN; PAM sequence: TTG
tcttctctaggatgttcctg

SEQ ID NO: 408546 - DNA, 20 bp, Artificial Sequence
  Description of Artificial Sequence: Synthetic oligonucleotide
  Target: LAMA2; (+) strand; PAM type: YTN; PAM sequence: CTT
ctctaggatgttcctgttga

SEQ ID NO: 408547 - DNA, 20 bp, Artificial Sequence
  Description of Artificial Sequence: Synthetic oligonucleotide
  Target: LAMA2; (+) strand; PAM type: YTN; PAM sequence: TTC
tctaggatgttcctgttgat

SEQ ID NO: 408548 - DNA, 20 bp, Artificial Sequence
  Description of Artificial Sequence: Synthetic oligonucleotide
  Target: LAMA2; (+) strand; PAM type: YTN; PAM sequence: CTC
taggatgttcctgttgatca

SEQ ID NO: 408549 - DNA, 20 bp, Artificial Sequence
  Description of Artificial Sequence: Synthetic oligonucleotide
  Target: LAMA2; (+) strand; PAM type: YTN; PAM sequence: CTA
ggatgttcctgttgatcaat

SEQ ID NO: 408550 - DNA, 20 bp, Artificial Sequence
  Description of Artificial Sequence: Synthetic oligonucleotide
  Target: LAMA2; (+) strand; PAM type: YTN; PAM sequence: TTC
ctgttgatcaattgtaggtg

SEQ ID NO: 408551 - DNA, 20 bp, Artificial Sequence
  Description of Artificial Sequence: Synthetic oligonucleotide
  Target: LAMA2; (+) strand; PAM type: YTN; PAM sequence: CTG
ttgatcaattgtaggtgcaa

SEQ ID NO: 408552 - DNA, 20 bp, Artificial Sequence
  Description of Artificial Sequence: Synthetic oligonucleotide
  Target: LAMA2; (+) strand; PAM type: YTN; PAM sequence: TTG
atcaattgtaggtgcaaagt

SEQ ID NO: 408553 - DNA, 20 bp, Artificial Sequence
  Description of Artificial Sequence: Synthetic oligonucleotide
  Target: LAMA2; (+) strand; PAM type: YTN; PAM sequence: TTG
taggtgcaaagtcaccctca

SEQ ID NO: 408554 - DNA, 20 bp, Artificial Sequence
  Description of Artificial Sequence: Synthetic oligonucleotide
  Target: LAMA2; (+) strand; PAM type: YTN; PAM sequence: CTC
atatttgcacctatatttcc

SEQ ID NO: 408555 - DNA, 20 bp, Artificial Sequence
  Description of Artificial Sequence: Synthetic oligonucleotide
  Target: LAMA2; (+) strand; PAM type: YTN; PAM sequence: TTT
gcacctatatttcctatggg

SEQ ID NO: 408556 - DNA, 20 bp, Artificial Sequence
  Description of Artificial Sequence: Synthetic oligonucleotide
  Target: LAMA2; (+) strand; PAM type: YTN; PAM sequence: TTG
cacctatatttcctatgggt

SEQ ID NO: 408557 - DNA, 20 bp, Artificial Sequence
  Description of Artificial Sequence: Synthetic oligonucleotide
  Target: LAMA2; (+) strand; PAM type: YTN; PAM sequence: CTA
tatttcctatgggtttaaca

SEQ ID NO: 408558 - DNA, 20 bp, Artificial Sequence
  Description of Artificial Sequence: Synthetic oligonucleotide
  Target: LAMA2; (+) strand; PAM type: YTN; PAM sequence: TTT
cctatgggtttaacatatgc

SEQ ID NO: 408559 - DNA, 20 bp, Artificial Sequence
  Description of Artificial Sequence: Synthetic oligonucleotide
  Target: LAMA2; (+) strand; PAM type: YTN; PAM sequence: TTC
ctatgggtttaacatatgca

SEQ ID NO: 408560 - DNA, 20 bp, Artificial Sequence
  Description of Artificial Sequence: Synthetic oligonucleotide
  Target: LAMA2; (+) strand; PAM type: YTN; PAM sequence: CTA
tgggtttaacatatgcatat

SEQ ID NO: 408561 - DNA, 20 bp, Artificial Sequence
  Description of Artificial Sequence: Synthetic oligonucleotide
  Target: LAMA2; (+) strand; PAM type: YTN; PAM sequence: TTT
aacatatgcatatgtaaaga

SEQ ID NO: 408562 - DNA, 20 bp, Artificial Sequence
  Description of Artificial Sequence: Synthetic oligonucleotide
  Target: LAMA2; (+) strand; PAM type: YTN; PAM sequence: TTA
acatatgcatatgtaaagag

SEQ ID NO: 408563 - DNA, 20 bp, Artificial Sequence
  Description of Artificial Sequence: Synthetic oligonucleotide
  Target: LAMA2; (+) strand; PAM type: YTN; PAM sequence: CTT
aaaatatattcacattatct

SEQ ID NO: 408564 - DNA, 20 bp, Artificial Sequence
  Description of Artificial Sequence: Synthetic oligonucleotide
  Target: LAMA2; (+) strand; PAM type: YTN; PAM sequence: TTA
aaatatattcacattatctt

SEQ ID NO: 408565 - DNA, 20 bp, Artificial Sequence
  Description of Artificial Sequence: Synthetic oligonucleotide
  Target: LAMA2; (+) strand; PAM type: YTN; PAM sequence: TTC
acattatcttaatttctact

SEQ ID NO: 408566 - DNA, 20 bp, Artificial Sequence
  Description of Artificial Sequence: Synthetic oligonucleotide
  Target: LAMA2; (+) strand; PAM type: YTN; PAM sequence: TTA
tcttaatttctactgtctcc

SEQ ID NO: 408567 - DNA, 20 bp, Artificial Sequence
  Description of Artificial Sequence: Synthetic oligonucleotide
  Target: LAMA2; (+) strand; PAM type: YTN; PAM sequence: CTT
aatttctactgtctccaagt

SEQ ID NO: 408568 - DNA, 20 bp, Artificial Sequence
  Description of Artificial Sequence: Synthetic oligonucleotide
  Target: LAMA2; (+) strand; PAM type: YTN; PAM sequence: TTA
atttctactgtctccaagtc

SEQ ID NO: 408569 - DNA, 20 bp, Artificial Sequence
  Description of Artificial Sequence: Synthetic oligonucleotide
  Target: LAMA2; (+) strand; PAM type: YTN; PAM sequence: TTT
ctactgtctccaagtccgac

SEQ ID NO: 408570 - DNA, 20 bp, Artificial Sequence
  Description of Artificial Sequence: Synthetic oligonucleotide
  Target: LAMA2; (+) strand; PAM type: YTN; PAM sequence: TTC
tactgtctccaagtccgact

SEQ ID NO: 408571 - DNA, 20 bp, Artificial Sequence
  Description of Artificial Sequence: Synthetic oligonucleotide
  Target: LAMA2; (+) strand; PAM type: YTN; PAM sequence: CTA
ctgtctccaagtccgactcc

SEQ ID NO: 408572 - DNA, 20 bp, Artificial Sequence
  Description of Artificial Sequence: Synthetic oligonucleotide
  Target: LAMA2; (+) strand; PAM type: YTN; PAM sequence: CTG
tctccaagtccgactcctta

SEQ ID NO: 408573 - DNA, 20 bp, Artificial Sequence
  Description of Artificial Sequence: Synthetic oligonucleotide
  Target: LAMA2; (+) strand; PAM type: YTN; PAM sequence: CTC
caagtccgactccttaccaa

SEQ ID NO: 408574 - DNA, 20 bp, Artificial Sequence
  Description of Artificial Sequence: Synthetic oligonucleotide
  Target: LAMA2; (+) strand; PAM type: YTN; PAM sequence: CTC
cttaccaaatctgtagacag

SEQ ID NO: 408575 - DNA, 20 bp, Artificial Sequence
  Description of Artificial Sequence: Synthetic oligonucleotide
  Target: LAMA2; (+) strand; PAM type: YTN; PAM sequence: CTT
accaaatctgtagacagtca

SEQ ID NO: 408576 - DNA, 20 bp, Artificial Sequence
  Description of Artificial Sequence: Synthetic oligonucleotide
  Target: LAMA2; (+) strand; PAM type: YTN; PAM sequence: TTA
ccaaatctgtagacagtcag

SEQ ID NO: 408577 - DNA, 20 bp, Artificial Sequence
  Description of Artificial Sequence: Synthetic oligonucleotide
  Target: LAMA2; (+) strand; PAM type: YTN; PAM sequence: CTG
tagacagtcagcttcggtcc

SEQ ID NO: 408578 - DNA, 20 bp, Artificial Sequence
  Description of Artificial Sequence: Synthetic oligonucleotide
  Target: LAMA2; (+) strand; PAM type: YTN; PAM sequence: CTT
cggtcccttaaatttaaatg

SEQ ID NO: 408579 - DNA, 20 bp, Artificial Sequence
  Description of Artificial Sequence: Synthetic oligonucleotide
  Target: LAMA2; (+) strand; PAM type: YTN; PAM sequence: TTC
ggtcccttaaatttaaatgt

SEQ ID NO: 408580 - DNA, 20 bp, Artificial Sequence
  Description of Artificial Sequence: Synthetic oligonucleotide
  Target: LAMA2; (+) strand; PAM type: YTN; PAM sequence: CTT
aaatttaaatgtaaattcct

SEQ ID NO: 408581 - DNA, 20 bp, Artificial Sequence
  Description of Artificial Sequence: Synthetic oligonucleotide
  Target: LAMA2; (+) strand; PAM type: YTN; PAM sequence: TTA
aatttaaatgtaaattcctc

SEQ ID NO: 408582 - DNA, 20 bp, Artificial Sequence
  Description of Artificial Sequence: Synthetic oligonucleotide
  Target: LAMA2; (+) strand; PAM type: YTN; PAM sequence: TTT
aaatgtaaattcctctaaga

SEQ ID NO: 408583 - DNA, 20 bp, Artificial Sequence
  Description of Artificial Sequence: Synthetic oligonucleotide
  Target: LAMA2; (+) strand; PAM type: YTN; PAM sequence: TTA
aatgtaaattcctctaagat

SEQ ID NO: 408584 - DNA, 20 bp, Artificial Sequence
  Description of Artificial Sequence: Synthetic oligonucleotide
  Target: LAMA2; (+) strand; PAM type: YTN; PAM sequence: TTC
ctctaagatcattttcccag

SEQ ID NO: 408585 - DNA, 20 bp, Artificial Sequence
  Description of Artificial Sequence: Synthetic oligonucleotide
  Target: LAMA2; (+) strand; PAM type: YTN; PAM sequence: CTC
taagatcattttcccagttg

SEQ ID NO: 408586 - DNA, 20 bp, Artificial Sequence
  Description of Artificial Sequence: Synthetic oligonucleotide
  Target: LAMA2; (+) strand; PAM type: YTN; PAM sequence: CTA
agatcattttcccagttgca

SEQ ID NO: 408587 - DNA, 20 bp, Artificial Sequence
  Description of Artificial Sequence: Synthetic oligonucleotide
  Target: LAMA2; (+) strand; PAM type: YTN; PAM sequence: TTT
tcccagttgcacaagctgaa

SEQ ID NO: 408588 - DNA, 20 bp, Artificial Sequence
  Description of Artificial Sequence: Synthetic oligonucleotide
  Target: LAMA2; (+) strand; PAM type: YTN; PAM sequence: TTT
cccagttgcacaagctgaag

SEQ ID NO: 408589 - DNA, 20 bp, Artificial Sequence
  Description of Artificial Sequence: Synthetic oligonucleotide
  Target: LAMA2; (+) strand; PAM type: YTN; PAM sequence: TTC
ccagttgcacaagctgaagt

SEQ ID NO: 408590 - DNA, 20 bp, Artificial Sequence
  Description of Artificial Sequence: Synthetic oligonucleotide
  Target: LAMA2; (+) strand; PAM type: YTN; PAM sequence: TTG
cacaagctgaagtaatagtc

SEQ ID NO: 408591 - DNA, 20 bp, Artificial Sequence
  Description of Artificial Sequence: Synthetic oligonucleotide
  Target: LAMA2; (+) strand; PAM type: YTN; PAM sequence: CTG
aagtaatagtcttttgggcc

SEQ ID NO: 408592 - DNA, 20 bp, Artificial Sequence
  Description of Artificial Sequence: Synthetic oligonucleotide
  Target: LAMA2; (+) strand; PAM type: YTN; PAM sequence: CTT
ttgggcctgactcatcccat

SEQ ID NO: 408593 - DNA, 20 bp, Artificial Sequence
  Description of Artificial Sequence: Synthetic oligonucleotide
  Target: LAMA2; (+) strand; PAM type: YTN; PAM sequence: TTT
tgggcctgactcatcccatc

SEQ ID NO: 408594 - DNA, 20 bp, Artificial Sequence
  Description of Artificial Sequence: Synthetic oligonucleotide
  Target: LAMA2; (+) strand; PAM type: YTN; PAM sequence: TTT
gggcctgactcatcccatcc

SEQ ID NO: 408595 - DNA, 20 bp, Artificial Sequence
  Description of Artificial Sequence: Synthetic oligonucleotide
  Target: LAMA2; (+) strand; PAM type: YTN; PAM sequence: TTG
ggcctgactcatcccatcct

SEQ ID NO: 408596 - DNA, 20 bp, Artificial Sequence
  Description of Artificial Sequence: Synthetic oligonucleotide
  Target: LAMA2; (+) strand; PAM type: YTN; PAM sequence: CTG
actcatcccatcctctctgg

SEQ ID NO: 408597 - DNA, 20 bp, Artificial Sequence
  Description of Artificial Sequence: Synthetic oligonucleotide
  Target: LAMA2; (+) strand; PAM type: YTN; PAM sequence: CTC
atcccatcctctctggacac

SEQ ID NO: 408598 - DNA, 20 bp, Artificial Sequence
  Description of Artificial Sequence: Synthetic oligonucleotide
  Target: LAMA2; (+) strand; PAM type: YTN; PAM sequence: CTC
tctggacacaaagaagggca

SEQ ID NO: 408599 - DNA, 20 bp, Artificial Sequence
  Description of Artificial Sequence: Synthetic oligonucleotide
  Target: LAMA2; (+) strand; PAM type: YTN; PAM sequence: CTC
tggacacaaagaagggcaga

SEQ ID NO: 408600 - DNA, 20 bp, Artificial Sequence
  Description of Artificial Sequence: Synthetic oligonucleotide
  Target: LAMA2; (+) strand; PAM type: YTN; PAM sequence: CTG
gacacaaagaagggcagaaa

SEQ ID NO: 408601 - DNA, 20 bp, Artificial Sequence
  Description of Artificial Sequence: Synthetic oligonucleotide
  Target: LAMA2; (+) strand; PAM type: YTN; PAM sequence: CTG
ggagaaagcaagtagaacac

SEQ ID NO: 408602 - DNA, 20 bp, Artificial Sequence
  Description of Artificial Sequence: Synthetic oligonucleotide
  Target: LAMA2; (+) strand; PAM type: YTN; PAM sequence: TTT
tatcccaatagcattcaagg

SEQ ID NO: 408603 - DNA, 20 bp, Artificial Sequence
  Description of Artificial Sequence: Synthetic oligonucleotide
  Target: LAMA2; (+) strand; PAM type: YTN; PAM sequence: TTT
atcccaatagcattcaagga

SEQ ID NO: 408604 - DNA, 20 bp, Artificial Sequence
  Description of Artificial Sequence: Synthetic oligonucleotide
  Target: LAMA2; (+) strand; PAM type: YTN; PAM sequence: TTA
tcccaatagcattcaaggat

SEQ ID NO: 408605 - DNA, 20 bp, Artificial Sequence
  Description of Artificial Sequence: Synthetic oligonucleotide
  Target: LAMA2; (+) strand; PAM type: YTN; PAM sequence: TTC
aaggatgttaaagcctaaag

SEQ ID NO: 408606 - DNA, 20 bp, Artificial Sequence
  Description of Artificial Sequence: Synthetic oligonucleotide
  Target: LAMA2; (+) strand; PAM type: YTN; PAM sequence: TTA
aagcctaaagaatgtcaacc

SEQ ID NO: 408607 - DNA, 20 bp, Artificial Sequence
  Description of Artificial Sequence: Synthetic oligonucleotide
  Target: LAMA2; (+) strand; PAM type: YTN; PAM sequence: CTA
aagaatgtcaaccagccggg

SEQ ID NO: 408608 - DNA, 20 bp, Artificial Sequence
  Description of Artificial Sequence: Synthetic oligonucleotide
  Target: LAMA2; (+) strand; PAM type: YTN; PAM sequence: CTG
taatcccagcactttggcag

SEQ ID NO: 408609 - DNA, 20 bp, Artificial Sequence
  Description of Artificial Sequence: Synthetic oligonucleotide
  Target: LAMA2; (+) strand; PAM type: YTN; PAM sequence: CTT
tggcaggtcaaagcaggagg

SEQ ID NO: 408610 - DNA, 20 bp, Artificial Sequence
  Description of Artificial Sequence: Synthetic oligonucleotide
  Target: LAMA2; (+) strand; PAM type: YTN; PAM sequence: TTT
ggcaggtcaaagcaggagga

SEQ ID NO: 408611 - DNA, 20 bp, Artificial Sequence
  Description of Artificial Sequence: Synthetic oligonucleotide
  Target: LAMA2; (+) strand; PAM type: YTN; PAM sequence: TTG
gcaggtcaaagcaggaggat

SEQ ID NO: 408612 - DNA, 20 bp, Artificial Sequence
  Description of Artificial Sequence: Synthetic oligonucleotide
  Target: LAMA2; (+) strand; PAM type: YTN; PAM sequence: TTT
gagcccaggagtttgaaact

SEQ ID NO: 408613 - DNA, 20 bp, Artificial Sequence
  Description of Artificial Sequence: Synthetic oligonucleotide
  Target: LAMA2; (+) strand; PAM type: YTN; PAM sequence: TTG
agcccaggagtttgaaacta

SEQ ID NO: 408614 - DNA, 20 bp, Artificial Sequence
  Description of Artificial Sequence: Synthetic oligonucleotide
  Target: LAMA2; (+) strand; PAM type: YTN; PAM sequence: TTT
gaaactaggctaggcagcat

SEQ ID NO: 408615 - DNA, 20 bp, Artificial Sequence
  Description of Artificial Sequence: Synthetic oligonucleotide
  Target: LAMA2; (+) strand; PAM type: YTN; PAM sequence: TTG
aaactaggctaggcagcatg

SEQ ID NO: 408616 - DNA, 20 bp, Artificial Sequence
  Description of Artificial Sequence: Synthetic oligonucleotide
  Target: LAMA2; (+) strand; PAM type: YTN; PAM sequence: CTA
ggctaggcagcatgataaga

SEQ ID NO: 408617 - DNA, 20 bp, Artificial Sequence
  Description of Artificial Sequence: Synthetic oligonucleotide
  Target: LAMA2; (+) strand; PAM type: YTN; PAM sequence: CTA
ggcagcatgataagaccctt

SEQ ID NO: 408618 - DNA, 20 bp, Artificial Sequence
  Description of Artificial Sequence: Synthetic oligonucleotide
  Target: LAMA2; (+) strand; PAM type: YTN; PAM sequence: CTT
tctctacaaaaaatgtttaa

SEQ ID NO: 408619 - DNA, 20 bp, Artificial Sequence
  Description of Artificial Sequence: Synthetic oligonucleotide
  Target: LAMA2; (+) strand; PAM type: YTN; PAM sequence: TTT
ctctacaaaaaatgtttaaa

SEQ ID NO: 408620 - DNA, 20 bp, Artificial Sequence
  Description of Artificial Sequence: Synthetic oligonucleotide
  Target: LAMA2; (+) strand; PAM type: YTN; PAM sequence: TTC
tctacaaaaaatgtttaaaa

SEQ ID NO: 408621 - DNA, 20 bp, Artificial Sequence
  Description of Artificial Sequence: Synthetic oligonucleotide
  Target: LAMA2; (+) strand; PAM type: YTN; PAM sequence: CTC
tacaaaaaatgtttaaaaat

SEQ ID NO: 408622 - DNA, 20 bp, Artificial Sequence
  Description of Artificial Sequence: Synthetic oligonucleotide
  Target: LAMA2; (+) strand; PAM type: YTN; PAM sequence: CTA
caaaaaatgtttaaaaatta

SEQ ID NO: 408623 - DNA, 20 bp, Artificial Sequence
  Description of Artificial Sequence: Synthetic oligonucleotide
  Target: LAMA2; (+) strand; PAM type: YTN; PAM sequence: TTT
aaaaattaaatgggcatggt

SEQ ID NO: 408624 - DNA, 20 bp, Artificial Sequence
  Description of Artificial Sequence: Synthetic oligonucleotide
  Target: LAMA2; (+) strand; PAM type: YTN; PAM sequence: TTA
aaaattaaatgggcatggtc

SEQ ID NO: 408625 - DNA, 20 bp, Artificial Sequence
  Description of Artificial Sequence: Synthetic oligonucleotide
  Target: LAMA2; (+) strand; PAM type: YTN; PAM sequence: TTA
aatgggcatggtcgtgcaca

SEQ ID NO: 408626 - DNA, 20 bp, Artificial Sequence
  Description of Artificial Sequence: Synthetic oligonucleotide
  Target: LAMA2; (+) strand; PAM type: YTN; PAM sequence: CTG
tgattccagctattcaggac

SEQ ID NO: 408627 - DNA, 20 bp, Artificial Sequence
  Description of Artificial Sequence: Synthetic oligonucleotide
  Target: LAMA2; (+) strand; PAM type: YTN; PAM sequence: TTC
cagctattcaggactgctat

SEQ ID NO: 408628 - DNA, 20 bp, Artificial Sequence
  Description of Artificial Sequence: Synthetic oligonucleotide
  Target: LAMA2; (+) strand; PAM type: YTN; PAM sequence: CTA
ttcaggactgctattcagct

SEQ ID NO: 408629 - DNA, 20 bp, Artificial Sequence
  Description of Artificial Sequence: Synthetic oligonucleotide
  Target: LAMA2; (+) strand; PAM type: YTN; PAM sequence: TTC
aggactgctattcagctgtt

SEQ ID NO: 408630 - DNA, 20 bp, Artificial Sequence
  Description of Artificial Sequence: Synthetic oligonucleotide
  Target: LAMA2; (+) strand; PAM type: YTN; PAM sequence: CTG
ctattcagctgttcacgcca

SEQ ID NO: 408631 - DNA, 20 bp, Artificial Sequence
  Description of Artificial Sequence: Synthetic oligonucleotide
  Target: LAMA2; (+) strand; PAM type: YTN; PAM sequence: CTA
ttcagctgttcacgccacca

SEQ ID NO: 408632 - DNA, 20 bp, Artificial Sequence
  Description of Artificial Sequence: Synthetic oligonucleotide
  Target: LAMA2; (+) strand; PAM type: YTN; PAM sequence: TTC
agctgttcacgccaccacac

SEQ ID NO: 408633 - DNA, 20 bp, Artificial Sequence
  Description of Artificial Sequence: Synthetic oligonucleotide
  Target: LAMA2; (+) strand; PAM type: YTN; PAM sequence: CTG
ttcacgccaccacactctag

SEQ ID NO: 408634 - DNA, 20 bp, Artificial Sequence
  Description of Artificial Sequence: Synthetic oligonucleotide
  Target: LAMA2; (+) strand; PAM type: YTN; PAM sequence: TTC
acgccaccacactctagcct

SEQ ID NO: 408635 - DNA, 20 bp, Artificial Sequence
  Description of Artificial Sequence: Synthetic oligonucleotide
  Target: LAMA2; (+) strand; PAM type: YTN; PAM sequence: CTC
tagcctggatgacagagtga

SEQ ID NO: 408636 - DNA, 20 bp, Artificial Sequence
  Description of Artificial Sequence: Synthetic oligonucleotide
  Target: LAMA2; (+) strand; PAM type: YTN; PAM sequence: CTA
gcctggatgacagagtgaga

SEQ ID NO: 408637 - DNA, 20 bp, Artificial Sequence
  Description of Artificial Sequence: Synthetic oligonucleotide
  Target: LAMA2; (+) strand; PAM type: YTN; PAM sequence: CTG
gatgacagagtgagactctg

SEQ ID NO: 408638 - DNA, 20 bp, Artificial Sequence
  Description of Artificial Sequence: Synthetic oligonucleotide
  Target: LAMA2; (+) strand; PAM type: YTN; PAM sequence: CTC
tgtctcaaaactttttttaa

SEQ ID NO: 408639 - DNA, 20 bp, Artificial Sequence
  Description of Artificial Sequence: Synthetic oligonucleotide
  Target: LAMA2; (+) strand; PAM type: YTN; PAM sequence: CTG
tctcaaaactttttttaaaa

SEQ ID NO: 408640 - DNA, 20 bp, Artificial Sequence
  Description of Artificial Sequence: Synthetic oligonucleotide
  Target: LAMA2; (+) strand; PAM type: YTN; PAM sequence: CTC
aaaactttttttaaaaaaga

SEQ ID NO: 408641 - DNA, 20 bp, Artificial Sequence
  Description of Artificial Sequence: Synthetic oligonucleotide
  Target: LAMA2; (+) strand; PAM type: YTN; PAM sequence: CTT
tttttaaaaaagagtatcaa

SEQ ID NO: 408642 - DNA, 20 bp, Artificial Sequence
  Description of Artificial Sequence: Synthetic oligonucleotide
  Target: LAMA2; (+) strand; PAM type: YTN; PAM sequence: TTT
ttttaaaaaagagtatcaat

SEQ ID NO: 408643 - DNA, 20 bp, Artificial Sequence
  Description of Artificial Sequence: Synthetic oligonucleotide
  Target: LAMA2; (+) strand; PAM type: YTN; PAM sequence: TTT
tttaaaaaagagtatcaatt

SEQ ID NO: 408644 - DNA, 20 bp, Artificial Sequence
  Description of Artificial Sequence: Synthetic oligonucleotide
  Target: LAMA2; (+) strand; PAM type: YTN; PAM sequence: TTT
ttaaaaaagagtatcaattt

SEQ ID NO: 408645 - DNA, 20 bp, Artificial Sequence
  Description of Artificial Sequence: Synthetic oligonucleotide
  Target: LAMA2; (+) strand; PAM type: YTN; PAM sequence: TTT
taaaaaagagtatcaatttt

SEQ ID NO: 408646 - DNA, 20 bp, Artificial Sequence
  Description of Artificial Sequence: Synthetic oligonucleotide
  Target: LAMA2; (+) strand; PAM type: YTN; PAM sequence: TTT
aaaaaagagtatcaattttg

SEQ ID NO: 408647 - DNA, 20 bp, Artificial Sequence
  Description of Artificial Sequence: Synthetic oligonucleotide
  Target: LAMA2; (+) strand; PAM type: YTN; PAM sequence: TTA
aaaaagagtatcaattttgc

SEQ ID NO: 408648 - DNA, 20 bp, Artificial Sequence
  Description of Artificial Sequence: Synthetic oligonucleotide
  Target: LAMA2; (+) strand; PAM type: YTN; PAM sequence: TTT
tgcaaggacataaactttag

SEQ ID NO: 408649 - DNA, 20 bp, Artificial Sequence
  Description of Artificial Sequence: Synthetic oligonucleotide
  Target: LAMA2; (+) strand; PAM type: YTN; PAM sequence: TTT
gcaaggacataaactttagt

SEQ ID NO: 408650 - DNA, 20 bp, Artificial Sequence
  Description of Artificial Sequence: Synthetic oligonucleotide
  Target: LAMA2; (+) strand; PAM type: YTN; PAM sequence: TTG
caaggacataaactttagta

SEQ ID NO: 408651 - DNA, 20 bp, Artificial Sequence
  Description of Artificial Sequence: Synthetic oligonucleotide
  Target: LAMA2; (+) strand; PAM type: YTN; PAM sequence: CTT
tagtatctatatcccctgtc

SEQ ID NO: 408652 - DNA, 20 bp, Artificial Sequence
  Description of Artificial Sequence: Synthetic oligonucleotide
  Target: LAMA2; (+) strand; PAM type: YTN; PAM sequence: TTT
agtatctatatcccctgtcc

SEQ ID NO: 408653 - DNA, 20 bp, Artificial Sequence
  Description of Artificial Sequence: Synthetic oligonucleotide
  Target: LAMA2; (+) strand; PAM type: YTN; PAM sequence: TTA
gtatctatatcccctgtcca

SEQ ID NO: 408654 - DNA, 20 bp, Artificial Sequence
  Description of Artificial Sequence: Synthetic oligonucleotide
  Target: LAMA2; (+) strand; PAM type: YTN; PAM sequence: CTA
tatcccctgtccatttgatt

SEQ ID NO: 408655 - DNA, 20 bp, Artificial Sequence
  Description of Artificial Sequence: Synthetic oligonucleotide
  Target: LAMA2; (+) strand; PAM type: YTN; PAM sequence: CTG
tccatttgattctgttaaaa

SEQ ID NO: 408656 - DNA, 20 bp, Artificial Sequence
  Description of Artificial Sequence: Synthetic oligonucleotide
  Target: LAMA2; (+) strand; PAM type: YTN; PAM sequence: TTT
gattctgttaaaagcaatcc

SEQ ID NO: 408657 - DNA, 20 bp, Artificial Sequence
  Description of Artificial Sequence: Synthetic oligonucleotide
  Target: LAMA2; (+) strand; PAM type: YTN; PAM sequence: TTG
attctgttaaaagcaatccc

SEQ ID NO: 408658 - DNA, 20 bp, Artificial Sequence
  Description of Artificial Sequence: Synthetic oligonucleotide
  Target: LAMA2; (+) strand; PAM type: YTN; PAM sequence: TTC
tgttaaaagcaatccctcaa

SEQ ID NO: 408659 - DNA, 20 bp, Artificial Sequence
  Description of Artificial Sequence: Synthetic oligonucleotide
  Target: LAMA2; (+) strand; PAM type: YTN; PAM sequence: CTG
ttaaaagcaatccctcaact

SEQ ID NO: 408660 - DNA, 20 bp, Artificial Sequence
  Description of Artificial Sequence: Synthetic oligonucleotide
  Target: LAMA2; (+) strand; PAM type: YTN; PAM sequence: TTA
aaagcaatccctcaactgcc

SEQ ID NO: 408661 - DNA, 20 bp, Artificial Sequence
  Description of Artificial Sequence: Synthetic oligonucleotide
  Target: LAMA2; (+) strand; PAM type: YTN; PAM sequence: CTC
aactgcccagatttaagcat

SEQ ID NO: 408662 - DNA, 20 bp, Artificial Sequence
  Description of Artificial Sequence: Synthetic oligonucleotide
  Target: LAMA2; (+) strand; PAM type: YTN; PAM sequence: CTG
cccagatttaagcatcatac

SEQ ID NO: 408663 - DNA, 20 bp, Artificial Sequence
  Description of Artificial Sequence: Synthetic oligonucleotide
  Target: LAMA2; (+) strand; PAM type: YTN; PAM sequence: TTT
aagcatcatacctcttattg

SEQ ID NO: 408664 - DNA, 20 bp, Artificial Sequence
  Description of Artificial Sequence: Synthetic oligonucleotide
  Target: LAMA2; (+) strand; PAM type: YTN; PAM sequence: TTA
agcatcatacctcttattgc

SEQ ID NO: 408665 - DNA, 20 bp, Artificial Sequence
  Description of Artificial Sequence: Synthetic oligonucleotide
  Target: LAMA2; (+) strand; PAM type: YTN; PAM sequence: CTC
ttattgccttggtattcttt

SEQ ID NO: 408666 - DNA, 20 bp, Artificial Sequence
  Description of Artificial Sequence: Synthetic oligonucleotide
  Target: LAMA2; (+) strand; PAM type: YTN; PAM sequence: CTT
attgccttggtattctttaa

SEQ ID NO: 408667 - DNA, 20 bp, Artificial Sequence
  Description of Artificial Sequence: Synthetic oligonucleotide
  Target: LAMA2; (+) strand; PAM type: YTN; PAM sequence: TTA
ttgccttggtattctttaat

SEQ ID NO: 408668 - DNA, 20 bp, Artificial Sequence
  Description of Artificial Sequence: Synthetic oligonucleotide
  Target: LAMA2; (+) strand; PAM type: YTN; PAM sequence: TTG
ccttggtattctttaatatc

SEQ ID NO: 408669 - DNA, 20 bp, Artificial Sequence
  Description of Artificial Sequence: Synthetic oligonucleotide
  Target: LAMA2; (+) strand; PAM type: YTN; PAM sequence: CTT
ggtattctttaatatcttca

SEQ ID NO: 408670 - DNA, 20 bp, Artificial Sequence
  Description of Artificial Sequence: Synthetic oligonucleotide
  Target: LAMA2; (+) strand; PAM type: YTN; PAM sequence: TTG
gtattctttaatatcttcaa

SEQ ID NO: 408671 - DNA, 20 bp, Artificial Sequence
  Description of Artificial Sequence: Synthetic oligonucleotide
  Target: LAMA2; (+) strand; PAM type: YTN; PAM sequence: TTC
tttaatatcttcaatcacat

SEQ ID NO: 408672 - DNA, 20 bp, Artificial Sequence
  Description of Artificial Sequence: Synthetic oligonucleotide
  Target: LAMA2; (+) strand; PAM type: YTN; PAM sequence: CTT
taatatcttcaatcacattt

SEQ ID NO: 408673 - DNA, 20 bp, Artificial Sequence
  Description of Artificial Sequence: Synthetic oligonucleotide
  Target: LAMA2; (+) strand; PAM type: YTN; PAM sequence: TTT
aatatcttcaatcacatttt

SEQ ID NO: 408674 - DNA, 20 bp, Artificial Sequence
  Description of Artificial Sequence: Synthetic oligonucleotide
  Target: LAMA2; (+) strand; PAM type: YTN; PAM sequence: TTA
atatcttcaatcacattttt

SEQ ID NO: 408675 - DNA, 20 bp, Artificial Sequence
  Description of Artificial Sequence: Synthetic oligonucleotide
  Target: LAMA2; (+) strand; PAM type: YTN; PAM sequence: CTT
caatcacattttttaaaacg

SEQ ID NO: 408676 - DNA, 20 bp, Artificial Sequence
  Description of Artificial Sequence: Synthetic oligonucleotide
  Target: LAMA2; (+) strand; PAM type: YTN; PAM sequence: TTC
aatcacattttttaaaacgt

SEQ ID NO: 408677 - DNA, 20 bp, Artificial Sequence
  Description of Artificial Sequence: Synthetic oligonucleotide
  Target: LAMA2; (+) strand; PAM type: YTN; PAM sequence: TTT
tttaaaacgtaattttccat

SEQ ID NO: 408678 - DNA, 20 bp, Artificial Sequence
  Description of Artificial Sequence: Synthetic oligonucleotide
  Target: LAMA2; (+) strand; PAM type: YTN; PAM sequence: TTT
ttaaaacgtaattttccatt

SEQ ID NO: 408679 - DNA, 20 bp, Artificial Sequence
  Description of Artificial Sequence: Synthetic oligonucleotide
  Target: LAMA2; (+) strand; PAM type: YTN; PAM sequence: TTT
taaaacgtaattttccattt

SEQ ID NO: 408680 - DNA, 20 bp, Artificial Sequence
  Description of Artificial Sequence: Synthetic oligonucleotide
  Target: LAMA2; (+) strand; PAM type: YTN; PAM sequence: TTT
aaaacgtaattttccattta

SEQ ID NO: 408681 - DNA, 20 bp, Artificial Sequence
  Description of Artificial Sequence: Synthetic oligonucleotide
  Target: LAMA2; (+) strand; PAM type: YTN; PAM sequence: TTA
aaacgtaattttccatttaa

SEQ ID NO: 408682 - DNA, 20 bp, Artificial Sequence
  Description of Artificial Sequence: Synthetic oligonucleotide
  Target: LAMA2; (+) strand; PAM type: YTN; PAM sequence: TTT
tccatttaatctagtttttc

SEQ ID NO: 408683 - DNA, 20 bp, Artificial Sequence
  Description of Artificial Sequence: Synthetic oligonucleotide
  Target: LAMA2; (+) strand; PAM type: YTN; PAM sequence: TTT
ccatttaatctagtttttct

SEQ ID NO: 408684 - DNA, 20 bp, Artificial Sequence
  Description of Artificial Sequence: Synthetic oligonucleotide
  Target: LAMA2; (+) strand; PAM type: YTN; PAM sequence: TTC
catttaatctagtttttctc

SEQ ID NO: 408685 - DNA, 20 bp, Artificial Sequence
  Description of Artificial Sequence: Synthetic oligonucleotide
  Target: LAMA2; (+) strand; PAM type: YTN; PAM sequence: TTT
aatctagtttttctcaatga

SEQ ID NO: 408686 - DNA, 20 bp, Artificial Sequence
  Description of Artificial Sequence: Synthetic oligonucleotide
  Target: LAMA2; (+) strand; PAM type: YTN; PAM sequence: TTA
atctagtttttctcaatgaa

SEQ ID NO: 408687 - DNA, 20 bp, Artificial Sequence
  Description of Artificial Sequence: Synthetic oligonucleotide
  Target: LAMA2; (+) strand; PAM type: YTN; PAM sequence: CTA
gtttttctcaatgaaagggt

SEQ ID NO: 408688 - DNA, 20 bp, Artificial Sequence
  Description of Artificial Sequence: Synthetic oligonucleotide
  Target: LAMA2; (+) strand; PAM type: YTN; PAM sequence: TTT
ttctcaatgaaagggttcat

SEQ ID NO: 408689 - DNA, 20 bp, Artificial Sequence
  Description of Artificial Sequence: Synthetic oligonucleotide
  Target: LAMA2; (+) strand; PAM type: YTN; PAM sequence: TTT
tctcaatgaaagggttcata

SEQ ID NO: 408690 - DNA, 20 bp, Artificial Sequence
  Description of Artificial Sequence: Synthetic oligonucleotide
  Target: LAMA2; (+) strand; PAM type: YTN; PAM sequence: TTT
ctcaatgaaagggttcatag

SEQ ID NO: 408691 - DNA, 20 bp, Artificial Sequence
  Description of Artificial Sequence: Synthetic oligonucleotide
  Target: LAMA2; (+) strand; PAM type: YTN; PAM sequence: TTC
tcaatgaaagggttcatagg

SEQ ID NO: 408692 - DNA, 20 bp, Artificial Sequence
  Description of Artificial Sequence: Synthetic oligonucleotide
  Target: LAMA2; (+) strand; PAM type: YTN; PAM sequence: CTC
aatgaaagggttcataggaa

SEQ ID NO: 408693 - DNA, 20 bp, Artificial Sequence
  Description of Artificial Sequence: Synthetic oligonucleotide
  Target: LAMA2; (+) strand; PAM type: YTN; PAM sequence: TTC
ataggaattattttgtctgc

SEQ ID NO: 408694 - DNA, 20 bp, Artificial Sequence
  Description of Artificial Sequence: Synthetic oligonucleotide
  Target: LAMA2; (+) strand; PAM type: YTN; PAM sequence: TTA
ttttgtctgccatgaccaaa

SEQ ID NO: 408695 - DNA, 20 bp, Artificial Sequence
  Description of Artificial Sequence: Synthetic oligonucleotide
  Target: LAMA2; (+) strand; PAM type: YTN; PAM sequence: TTT
tgtctgccatgaccaaaaga

SEQ ID NO: 408696 - DNA, 20 bp, Artificial Sequence
  Description of Artificial Sequence: Synthetic oligonucleotide
  Target: LAMA2; (+) strand; PAM type: YTN; PAM sequence: TTT
gtctgccatgaccaaaagaa

SEQ ID NO: 408697 - DNA, 20 bp, Artificial Sequence
  Description of Artificial Sequence: Synthetic oligonucleotide
  Target: LAMA2; (+) strand; PAM type: YTN; PAM sequence: TTG
tctgccatgaccaaaagaac

SEQ ID NO: 408698 - DNA, 20 bp, Artificial Sequence
  Description of Artificial Sequence: Synthetic oligonucleotide
  Target: LAMA2; (+) strand; PAM type: YTN; PAM sequence: CTG
ccatgaccaaaagaacacaa

SEQ ID NO: 408699 - DNA, 20 bp, Artificial Sequence
  Description of Artificial Sequence: Synthetic oligonucleotide
  Target: LAMA2; (+) strand; PAM type: YTN; PAM sequence: CTT
tacaaatatatccttaagta

SEQ ID NO: 408700 - DNA, 20 bp, Artificial Sequence
  Description of Artificial Sequence: Synthetic oligonucleotide
  Target: LAMA2; (+) strand; PAM type: YTN; PAM sequence: TTT
acaaatatatccttaagtat

SEQ ID NO: 408701 - DNA, 20 bp, Artificial Sequence
  Description of Artificial Sequence: Synthetic oligonucleotide
  Target: LAMA2; (+) strand; PAM type: YTN; PAM sequence: TTA
caaatatatccttaagtatg

SEQ ID NO: 408702 - DNA, 20 bp, Artificial Sequence
  Description of Artificial Sequence: Synthetic oligonucleotide
  Target: LAMA2; (+) strand; PAM type: YTN; PAM sequence: CTT
aagtatgcacatacccttgt

SEQ ID NO: 408703 - DNA, 20 bp, Artificial Sequence
  Description of Artificial Sequence: Synthetic oligonucleotide
  Target: LAMA2; (+) strand; PAM type: YTN; PAM sequence: TTA
agtatgcacatacccttgta

SEQ ID NO: 408704 - DNA, 20 bp, Artificial Sequence
  Description of Artificial Sequence: Synthetic oligonucleotide
  Target: LAMA2; (+) strand; PAM type: YTN; PAM sequence: CTT
gtaaaccagatcatgttatt

SEQ ID NO: 408705 - DNA, 20 bp, Artificial Sequence
  Description of Artificial Sequence: Synthetic oligonucleotide
  Target: LAMA2; (+) strand; PAM type: YTN; PAM sequence: TTG
taaaccagatcatgttattt

SEQ ID NO: 408706 - DNA, 20 bp, Artificial Sequence
  Description of Artificial Sequence: Synthetic oligonucleotide
  Target: LAMA2; (+) strand; PAM type: YTN; PAM sequence: TTA
tttgtgattacgtgttttaa

SEQ ID NO: 408707 - DNA, 20 bp, Artificial Sequence
  Description of Artificial Sequence: Synthetic oligonucleotide
  Target: LAMA2; (+) strand; PAM type: YTN; PAM sequence: TTT
gtgattacgtgttttaaaaa

SEQ ID NO: 408708 - DNA, 20 bp, Artificial Sequence
  Description of Artificial Sequence: Synthetic oligonucleotide
  Target: LAMA2; (+) strand; PAM type: YTN; PAM sequence: TTG
tgattacgtgttttaaaaat

SEQ ID NO: 408709 - DNA, 20 bp, Artificial Sequence
  Description of Artificial Sequence: Synthetic oligonucleotide
  Target: LAMA2; (+) strand; PAM type: YTN; PAM sequence: TTA
cgtgttttaaaaatcaattt

SEQ ID NO: 408710 - DNA, 20 bp, Artificial Sequence
  Description of Artificial Sequence: Synthetic oligonucleotide
  Target: LAMA2; (+) strand; PAM type: YTN; PAM sequence: TTT
taaaaatcaattttagtatg

SEQ ID NO: 408711 - DNA, 20 bp, Artificial Sequence
  Description of Artificial Sequence: Synthetic oligonucleotide
  Target: LAMA2; (+) strand; PAM type: YTN; PAM sequence: TTT
aaaaatcaattttagtatgt

SEQ ID NO: 408712 - DNA, 20 bp, Artificial Sequence
  Description of Artificial Sequence: Synthetic oligonucleotide
  Target: LAMA2; (+) strand; PAM type: YTN; PAM sequence: TTA
aaaatcaattttagtatgta

SEQ ID NO: 408713 - DNA, 20 bp, Artificial Sequence
  Description of Artificial Sequence: Synthetic oligonucleotide
  Target: LAMA2; (+) strand; PAM type: YTN; PAM sequence: TTT
tagtatgtaacatttagtga

SEQ ID NO: 408714 - DNA, 20 bp, Artificial Sequence
  Description of Artificial Sequence: Synthetic oligonucleotide
  Target: LAMA2; (+) strand; PAM type: YTN; PAM sequence: TTT
agtatgtaacatttagtgat

SEQ ID NO: 408715 - DNA, 20 bp, Artificial Sequence
  Description of Artificial Sequence: Synthetic oligonucleotide
  Target: LAMA2; (+) strand; PAM type: YTN; PAM sequence: TTA
gtatgtaacatttagtgatc

SEQ ID NO: 408716 - DNA, 20 bp, Artificial Sequence
  Description of Artificial Sequence: Synthetic oligonucleotide
  Target: LAMA2; (+) strand; PAM type: YTN; PAM sequence: TTT
agtgatcaatcatattatgt

SEQ ID NO: 408717 - DNA, 20 bp, Artificial Sequence
  Description of Artificial Sequence: Synthetic oligonucleotide
  Target: LAMA2; (+) strand; PAM type: YTN; PAM sequence: TTA
gtgatcaatcatattatgta

SEQ ID NO: 408718 - DNA, 20 bp, Artificial Sequence
  Description of Artificial Sequence: Synthetic oligonucleotide
  Target: LAMA2; (+) strand; PAM type: YTN; PAM sequence: TTA
tgtaacaaatcttatttatt

SEQ ID NO: 408719 - DNA, 20 bp, Artificial Sequence
  Description of Artificial Sequence: Synthetic oligonucleotide
  Target: LAMA2; (+) strand; PAM type: YTN; PAM sequence: CTT
atttatttttctaaaaaata

SEQ ID NO: 408720 - DNA, 20 bp, Artificial Sequence
  Description of Artificial Sequence: Synthetic oligonucleotide
  Target: LAMA2; (+) strand; PAM type: YTN; PAM sequence: TTA
tttatttttctaaaaaatac

SEQ ID NO: 408721 - DNA, 20 bp, Artificial Sequence
  Description of Artificial Sequence: Synthetic oligonucleotide
  Target: LAMA2; (+) strand; PAM type: YTN; PAM sequence: TTT
atttttctaaaaaatacaaa

SEQ ID NO: 408722 - DNA, 20 bp, Artificial Sequence
  Description of Artificial Sequence: Synthetic oligonucleotide
  Target: LAMA2; (+) strand; PAM type: YTN; PAM sequence: TTA
tttttctaaaaaatacaaag

SEQ ID NO: 408723 - DNA, 20 bp, Artificial Sequence
  Description of Artificial Sequence: Synthetic oligonucleotide
  Target: LAMA2; (+) strand; PAM type: YTN; PAM sequence: TTT
ttctaaaaaatacaaagccc

SEQ ID NO: 408724 - DNA, 20 bp, Artificial Sequence
  Description of Artificial Sequence: Synthetic oligonucleotide
  Target: LAMA2; (+) strand; PAM type: YTN; PAM sequence: TTT
tctaaaaaatacaaagccca

SEQ ID NO: 408725 - DNA, 20 bp, Artificial Sequence
  Description of Artificial Sequence: Synthetic oligonucleotide
  Target: LAMA2; (+) strand; PAM type: YTN; PAM sequence: TTT
ctaaaaaatacaaagcccac

SEQ ID NO: 408726 - DNA, 20 bp, Artificial Sequence
  Description of Artificial Sequence: Synthetic oligonucleotide
  Target: LAMA2; (+) strand; PAM type: YTN; PAM sequence: TTC
taaaaaatacaaagcccaca

SEQ ID NO: 408727 - DNA, 20 bp, Artificial Sequence
  Description of Artificial Sequence: Synthetic oligonucleotide
  Target: LAMA2; (+) strand; PAM type: YTN; PAM sequence: CTA
aaaaatacaaagcccacaca

SEQ ID NO: 408728 - DNA, 20 bp, Artificial Sequence
  Description of Artificial Sequence: Synthetic oligonucleotide
  Target: LAMA2; (+) strand; PAM type: YTN; PAM sequence: TTC
acaaagagaacccaaagatg

SEQ ID NO: 408729 - DNA, 20 bp, Artificial Sequence
  Description of Artificial Sequence: Synthetic oligonucleotide
  Target: LAMA2; (+) strand; PAM type: YTN; PAM sequence: CTT
ggattatttcaggaatgcag

SEQ ID NO: 408730 - DNA, 20 bp, Artificial Sequence
  Description of Artificial Sequence: Synthetic oligonucleotide
  Target: LAMA2; (+) strand; PAM type: YTN; PAM sequence: TTG
gattatttcaggaatgcaga

SEQ ID NO: 408731 - DNA, 20 bp, Artificial Sequence
  Description of Artificial Sequence: Synthetic oligonucleotide
  Target: LAMA2; (+) strand; PAM type: YTN; PAM sequence: TTA
tttcaggaatgcagaagtgg

SEQ ID NO: 408732 - DNA, 20 bp, Artificial Sequence
  Description of Artificial Sequence: Synthetic oligonucleotide
  Target: LAMA2; (+) strand; PAM type: YTN; PAM sequence: TTT
caggaatgcagaagtggttt

SEQ ID NO: 408733 - DNA, 20 bp, Artificial Sequence
  Description of Artificial Sequence: Synthetic oligonucleotide
  Target: LAMA2; (+) strand; PAM type: YTN; PAM sequence: TTC
aggaatgcagaagtggttta

SEQ ID NO: 408734 - DNA, 20 bp, Artificial Sequence
  Description of Artificial Sequence: Synthetic oligonucleotide
  Target: LAMA2; (+) strand; PAM type: YTN; PAM sequence: TTT
aatgttagaaaatcaaaata

SEQ ID NO: 408735 - DNA, 20 bp, Artificial Sequence
  Description of Artificial Sequence: Synthetic oligonucleotide
  Target: LAMA2; (+) strand; PAM type: YTN; PAM sequence: TTA
atgttagaaaatcaaaatat

SEQ ID NO: 408736 - DNA, 20 bp, Artificial Sequence
  Description of Artificial Sequence: Synthetic oligonucleotide
  Target: LAMA2; (+) strand; PAM type: YTN; PAM sequence: TTA
gaaaatcaaaatatcagcca

SEQ ID NO: 408737 - DNA, 20 bp, Artificial Sequence
  Description of Artificial Sequence: Synthetic oligonucleotide
  Target: LAMA2; (+) strand; PAM type: YTN; PAM sequence: CTC
acgcctgtaatcccagcact

SEQ ID NO: 408738 - DNA, 20 bp, Artificial Sequence
  Description of Artificial Sequence: Synthetic oligonucleotide
  Target: LAMA2; (+) strand; PAM type: YTN; PAM sequence: CTG
taatcccagcactttgggag

SEQ ID NO: 408739 - DNA, 20 bp, Artificial Sequence
  Description of Artificial Sequence: Synthetic oligonucleotide
  Target: LAMA2; (+) strand; PAM type: YTN; PAM sequence: CTT
tgggaggccaaggtgggtag

SEQ ID NO: 408740 - DNA, 20 bp, Artificial Sequence
  Description of Artificial Sequence: Synthetic oligonucleotide
  Target: LAMA2; (+) strand; PAM type: YTN; PAM sequence: TTT
gggaggccaaggtgggtaga

SEQ ID NO: 408741 - DNA, 20 bp, Artificial Sequence
  Description of Artificial Sequence: Synthetic oligonucleotide
  Target: LAMA2; (+) strand; PAM type: YTN; PAM sequence: TTG
ggaggccaaggtgggtagat

SEQ ID NO: 408742 - DNA, 20 bp, Artificial Sequence
  Description of Artificial Sequence: Synthetic oligonucleotide
  Target: LAMA2; (+) strand; PAM type: YTN; PAM sequence: TTT
cgagaccagcctggccaaca

SEQ ID NO: 408743 - DNA, 20 bp, Artificial Sequence
  Description of Artificial Sequence: Synthetic oligonucleotide
  Target: LAMA2; (+) strand; PAM type: YTN; PAM sequence: TTC
gagaccagcctggccaacat

SEQ ID NO: 408744 - DNA, 20 bp, Artificial Sequence
  Description of Artificial Sequence: Synthetic oligonucleotide
  Target: LAMA2; (+) strand; PAM type: YTN; PAM sequence: CTG
gccaacatagtgaaatcctg

SEQ ID NO: 408745 - DNA, 20 bp, Artificial Sequence
  Description of Artificial Sequence: Synthetic oligonucleotide
  Target: LAMA2; (+) strand; PAM type: YTN; PAM sequence: CTG
tctaatttgtatactaaaaa

SEQ ID NO: 408746 - DNA, 20 bp, Artificial Sequence
  Description of Artificial Sequence: Synthetic oligonucleotide
  Target: LAMA2; (+) strand; PAM type: YTN; PAM sequence: CTA
atttgtatactaaaaataca

SEQ ID NO: 408747 - DNA, 20 bp, Artificial Sequence
  Description of Artificial Sequence: Synthetic oligonucleotide
  Target: LAMA2; (+) strand; PAM type: YTN; PAM sequence: TTT
gtatactaaaaatacaaaaa

SEQ ID NO: 408748 - DNA, 20 bp, Artificial Sequence
  Description of Artificial Sequence: Synthetic oligonucleotide
  Target: LAMA2; (+) strand; PAM type: YTN; PAM sequence: TTG
tatactaaaaatacaaaaaa

SEQ ID NO: 408749 - DNA, 20 bp, Artificial Sequence
  Description of Artificial Sequence: Synthetic oligonucleotide
  Target: LAMA2; (+) strand; PAM type: YTN; PAM sequence: CTA
aaaatacaaaaaattagcca

SEQ ID NO: 408750 - DNA, 20 bp, Artificial Sequence
  Description of Artificial Sequence: Synthetic oligonucleotide
  Target: LAMA2; (+) strand; PAM type: YTN; PAM sequence: TTA
gccaggcatggtagcaggtg

SEQ ID NO: 408751 - DNA, 20 bp, Artificial Sequence
  Description of Artificial Sequence: Synthetic oligonucleotide
  Target: LAMA2; (+) strand; PAM type: YTN; PAM sequence: CTA
taatcccagttacttgggag

SEQ ID NO: 408752 - DNA, 20 bp, Artificial Sequence
  Description of Artificial Sequence: Synthetic oligonucleotide
  Target: LAMA2; (+) strand; PAM type: YTN; PAM sequence: TTA
cttgggaggctgaggcagga

SEQ ID NO: 408753 - DNA, 20 bp, Artificial Sequence
  Description of Artificial Sequence: Synthetic oligonucleotide
  Target: LAMA2; (+) strand; PAM type: YTN; PAM sequence: CTT
gggaggctgaggcaggagaa

SEQ ID NO: 408754 - DNA, 20 bp, Artificial Sequence
  Description of Artificial Sequence: Synthetic oligonucleotide
  Target: LAMA2; (+) strand; PAM type: YTN; PAM sequence: TTG
ggaggctgaggcaggagaat

SEQ ID NO: 408755 - DNA, 20 bp, Artificial Sequence
  Description of Artificial Sequence: Synthetic oligonucleotide
  Target: LAMA2; (+) strand; PAM type: YTN; PAM sequence: CTG
aggcaggagaattgcttgaa

SEQ ID NO: 408756 - DNA, 20 bp, Artificial Sequence
  Description of Artificial Sequence: Synthetic oligonucleotide
  Target: LAMA2; (+) strand; PAM type: YTN; PAM sequence: TTG
cttgaacctgggaggccgag

SEQ ID NO: 408757 - DNA, 20 bp, Artificial Sequence
  Description of Artificial Sequence: Synthetic oligonucleotide
  Target: LAMA2; (+) strand; PAM type: YTN; PAM sequence: CTT
gaacctgggaggccgaggtt

SEQ ID NO: 408758 - DNA, 20 bp, Artificial Sequence
  Description of Artificial Sequence: Synthetic oligonucleotide
  Target: LAMA2; (+) strand; PAM type: YTN; PAM sequence: TTG
aacctgggaggccgaggttg

SEQ ID NO: 408759 - DNA, 20 bp, Artificial Sequence
  Description of Artificial Sequence: Synthetic oligonucleotide
  Target: LAMA2; (+) strand; PAM type: YTN; PAM sequence: CTG
ggaggccgaggttgcagtga

SEQ ID NO: 408760 - DNA, 20 bp, Artificial Sequence
  Description of Artificial Sequence: Synthetic oligonucleotide
  Target: LAMA2; (+) strand; PAM type: YTN; PAM sequence: TTG
cagtgagccgagattgtgcc

SEQ ID NO: 408761 - DNA, 20 bp, Artificial Sequence
  Description of Artificial Sequence: Synthetic oligonucleotide
  Target: LAMA2; (+) strand; PAM type: YTN; PAM sequence: TTG
tgccattgcactccagcctg

SEQ ID NO: 408762 - DNA, 20 bp, Artificial Sequence
  Description of Artificial Sequence: Synthetic oligonucleotide
  Target: LAMA2; (+) strand; PAM type: YTN; PAM sequence: TTG
cactccagcctgcgcgacaa

SEQ ID NO: 408763 - DNA, 20 bp, Artificial Sequence
  Description of Artificial Sequence: Synthetic oligonucleotide
  Target: LAMA2; (+) strand; PAM type: YTN; PAM sequence: CTC
cagcctgcgcgacaatgtga

SEQ ID NO: 408764 - DNA, 20 bp, Artificial Sequence
  Description of Artificial Sequence: Synthetic oligonucleotide
  Target: LAMA2; (+) strand; PAM type: YTN; PAM sequence: CTG
cgcgacaatgtgagactccg

SEQ ID NO: 408765 - DNA, 20 bp, Artificial Sequence
  Description of Artificial Sequence: Synthetic oligonucleotide
  Target: LAMA2; (+) strand; PAM type: YTN; PAM sequence: CTC
cgactcgaaaaaaaaaaaaa

SEQ ID NO: 408766 - DNA, 20 bp, Artificial Sequence
  Description of Artificial Sequence: Synthetic oligonucleotide
  Target: LAMA2; (+) strand; PAM type: YTN; PAM sequence: CTC
gaaaaaaaaaaaaaaagaaa

SEQ ID NO: 408767 - DNA, 20 bp, Artificial Sequence
  Description of Artificial Sequence: Synthetic oligonucleotide
  Target: LAMA2; (+) strand; PAM type: YTN; PAM sequence: CTA
aaaataatataatcttgtca

SEQ ID NO: 408768 - DNA, 20 bp, Artificial Sequence
  Description of Artificial Sequence: Synthetic oligonucleotide
  Target: LAMA2; (+) strand; PAM type: YTN; PAM sequence: CTT
gtcaatagatagtaaaaaca

SEQ ID NO: 408769 - DNA, 20 bp, Artificial Sequence
  Description of Artificial Sequence: Synthetic oligonucleotide
  Target: LAMA2; (+) strand; PAM type: YTN; PAM sequence: TTG
tcaatagatagtaaaaacat

SEQ ID NO: 408770 - DNA, 20 bp, Artificial Sequence
  Description of Artificial Sequence: Synthetic oligonucleotide
  Target: LAMA2; (+) strand; PAM type: YTN; PAM sequence: TTT
ggtaaaatttaacagtcatt

SEQ ID NO: 408771 - DNA, 20 bp, Artificial Sequence
  Description of Artificial Sequence: Synthetic oligonucleotide
  Target: LAMA2; (+) strand; PAM type: YTN; PAM sequence: TTG
gtaaaatttaacagtcattc

SEQ ID NO: 408772 - DNA, 20 bp, Artificial Sequence
  Description of Artificial Sequence: Synthetic oligonucleotide
  Target: LAMA2; (+) strand; PAM type: YTN; PAM sequence: TTT
aacagtcattcatgattttt

SEQ ID NO: 408773 - DNA, 20 bp, Artificial Sequence
  Description of Artificial Sequence: Synthetic oligonucleotide
  Target: LAMA2; (+) strand; PAM type: YTN; PAM sequence: TTA
acagtcattcatgattttta

SEQ ID NO: 408774 - DNA, 20 bp, Artificial Sequence
  Description of Artificial Sequence: Synthetic oligonucleotide
  Target: LAMA2; (+) strand; PAM type: YTN; PAM sequence: TTC
atgatttttaaaaaatactt

SEQ ID NO: 408775 - DNA, 20 bp, Artificial Sequence
  Description of Artificial Sequence: Synthetic oligonucleotide
  Target: LAMA2; (+) strand; PAM type: YTN; PAM sequence: TTT
ttaaaaaatacttaagtaaa

SEQ ID NO: 408776 - DNA, 20 bp, Artificial Sequence
  Description of Artificial Sequence: Synthetic oligonucleotide
  Target: LAMA2; (+) strand; PAM type: YTN; PAM sequence: TTT
taaaaaatacttaagtaaac

SEQ ID NO: 408777 - DNA, 20 bp, Artificial Sequence
  Description of Artificial Sequence: Synthetic oligonucleotide
  Target: LAMA2; (+) strand; PAM type: YTN; PAM sequence: TTT
aaaaaatacttaagtaaact

SEQ ID NO: 408778 - DNA, 20 bp, Artificial Sequence
  Description of Artificial Sequence: Synthetic oligonucleotide
  Target: LAMA2; (+) strand; PAM type: YTN; PAM sequence: TTA
aaaaatacttaagtaaacta

SEQ ID NO: 408779 - DNA, 20 bp, Artificial Sequence
  Description of Artificial Sequence: Synthetic oligonucleotide
  Target: LAMA2; (+) strand; PAM type: YTN; PAM sequence: CTT
aagtaaactaagaggaagga

SEQ ID NO: 408780 - DNA, 20 bp, Artificial Sequence
  Description of Artificial Sequence: Synthetic oligonucleotide
  Target: LAMA2; (+) strand; PAM type: YTN; PAM sequence: TTA
agtaaactaagaggaaggaa

SEQ ID NO: 408781 - DNA, 20 bp, Artificial Sequence
  Description of Artificial Sequence: Synthetic oligonucleotide
  Target: LAMA2; (+) strand; PAM type: YTN; PAM sequence: CTA
agaggaaggaacttccttag

SEQ ID NO: 408782 - DNA, 20 bp, Artificial Sequence
  Description of Artificial Sequence: Synthetic oligonucleotide
  Target: LAMA2; (+) strand; PAM type: YTN; PAM sequence: CTT
ccttagccatctataaaaaa

SEQ ID NO: 408783 - DNA, 20 bp, Artificial Sequence
  Description of Artificial Sequence: Synthetic oligonucleotide
  Target: LAMA2; (+) strand; PAM type: YTN; PAM sequence: TTC
cttagccatctataaaaaaa

SEQ ID NO: 408784 - DNA, 20 bp, Artificial Sequence
  Description of Artificial Sequence: Synthetic oligonucleotide
  Target: LAMA2; (+) strand; PAM type: YTN; PAM sequence: CTT
agccatctataaaaaaaaaa

SEQ ID NO: 408785 - DNA, 20 bp, Artificial Sequence
  Description of Artificial Sequence: Synthetic oligonucleotide
  Target: LAMA2; (+) strand; PAM type: YTN; PAM sequence: TTA
gccatctataaaaaaaaaac

SEQ ID NO: 408786 - DNA, 20 bp, Artificial Sequence
  Description of Artificial Sequence: Synthetic oligonucleotide
  Target: LAMA2; (+) strand; PAM type: YTN; PAM sequence: CTA
taaaaaaaaaactataacaa

SEQ ID NO: 408787 - DNA, 20 bp, Artificial Sequence
  Description of Artificial Sequence: Synthetic oligonucleotide
  Target: LAMA2; (+) strand; PAM type: YTN; PAM sequence: CTA
taacaagtattcctgattta

SEQ ID NO: 408788 - DNA, 20 bp, Artificial Sequence
  Description of Artificial Sequence: Synthetic oligonucleotide
  Target: LAMA2; (+) strand; PAM type: YTN; PAM sequence: TTC
ctgatttaaaaaaaagacat

SEQ ID NO: 408789 - DNA, 20 bp, Artificial Sequence
  Description of Artificial Sequence: Synthetic oligonucleotide
  Target: LAMA2; (+) strand; PAM type: YTN; PAM sequence: CTG
atttaaaaaaaagacattat

SEQ ID NO: 408790 - DNA, 20 bp, Artificial Sequence
  Description of Artificial Sequence: Synthetic oligonucleotide
  Target: LAMA2; (+) strand; PAM type: YTN; PAM sequence: TTT
aaaaaaaagacattataaac

SEQ ID NO: 408791 - DNA, 20 bp, Artificial Sequence
  Description of Artificial Sequence: Synthetic oligonucleotide
  Target: LAMA2; (+) strand; PAM type: YTN; PAM sequence: TTA
aaaaaaagacattataaaca

SEQ ID NO: 408792 - DNA, 20 bp, Artificial Sequence
  Description of Artificial Sequence: Synthetic oligonucleotide
  Target: LAMA2; (+) strand; PAM type: YTN; PAM sequence: TTA
taaacatttgctataaaatc

SEQ ID NO: 408793 - DNA, 20 bp, Artificial Sequence
  Description of Artificial Sequence: Synthetic oligonucleotide
  Target: LAMA2; (+) strand; PAM type: YTN; PAM sequence: TTT
gctataaaatcaagcccaag

SEQ ID NO: 408794 - DNA, 20 bp, Artificial Sequence
  Description of Artificial Sequence: Synthetic oligonucleotide
  Target: LAMA2; (+) strand; PAM type: YTN; PAM sequence: TTG
ctataaaatcaagcccaaga

SEQ ID NO: 408795 - DNA, 20 bp, Artificial Sequence
  Description of Artificial Sequence: Synthetic oligonucleotide
  Target: LAMA2; (+) strand; PAM type: YTN; PAM sequence: CTA
taaaatcaagcccaagaaac

SEQ ID NO: 408796 - DNA, 20 bp, Artificial Sequence
  Description of Artificial Sequence: Synthetic oligonucleotide
  Target: LAMA2; (+) strand; PAM type: YTN; PAM sequence: CTA
ttttgactgcactgatctta

SEQ ID NO: 408797 - DNA, 20 bp, Artificial Sequence
  Description of Artificial Sequence: Synthetic oligonucleotide
  Target: LAMA2; (+) strand; PAM type: YTN; PAM sequence: TTT
tgactgcactgatcttagct

SEQ ID NO: 408798 - DNA, 20 bp, Artificial Sequence
  Description of Artificial Sequence: Synthetic oligonucleotide
  Target: LAMA2; (+) strand; PAM type: YTN; PAM sequence: TTT
gactgcactgatcttagcta

SEQ ID NO: 408799 - DNA, 20 bp, Artificial Sequence
  Description of Artificial Sequence: Synthetic oligonucleotide
  Target: LAMA2; (+) strand; PAM type: YTN; PAM sequence: TTG
actgcactgatcttagctag

SEQ ID NO: 408800 - DNA, 20 bp, Artificial Sequence
  Description of Artificial Sequence: Synthetic oligonucleotide
  Target: LAMA2; (+) strand; PAM type: YTN; PAM sequence: CTG
cactgatcttagctagcata

SEQ ID NO: 408801 - DNA, 20 bp, Artificial Sequence
  Description of Artificial Sequence: Synthetic oligonucleotide
  Target: LAMA2; (+) strand; PAM type: YTN; PAM sequence: CTG
atcttagctagcatagtaag

SEQ ID NO: 408802 - DNA, 20 bp, Artificial Sequence
  Description of Artificial Sequence: Synthetic oligonucleotide
  Target: LAMA2; (+) strand; PAM type: YTN; PAM sequence: CTT
agctagcatagtaagaaaag

SEQ ID NO: 408803 - DNA, 20 bp, Artificial Sequence
  Description of Artificial Sequence: Synthetic oligonucleotide
  Target: LAMA2; (+) strand; PAM type: YTN; PAM sequence: TTA
gctagcatagtaagaaaaga

SEQ ID NO: 408804 - DNA, 20 bp, Artificial Sequence
  Description of Artificial Sequence: Synthetic oligonucleotide
  Target: LAMA2; (+) strand; PAM type: YTN; PAM sequence: CTA
gcatagtaagaaaagaacaa

SEQ ID NO: 408805 - DNA, 20 bp, Artificial Sequence
  Description of Artificial Sequence: Synthetic oligonucleotide
  Target: LAMA2; (+) strand; PAM type: YTN; PAM sequence: TTT
aagaatcattataacaaaat

SEQ ID NO: 408806 - DNA, 20 bp, Artificial Sequence
  Description of Artificial Sequence: Synthetic oligonucleotide
  Target: LAMA2; (+) strand; PAM type: YTN; PAM sequence: TTA
agaatcattataacaaaata

SEQ ID NO: 408807 - DNA, 20 bp, Artificial Sequence
  Description of Artificial Sequence: Synthetic oligonucleotide
  Target: LAMA2; (+) strand; PAM type: YTN; PAM sequence: TTA
taacaaaatagacataaagc

SEQ ID NO: 408808 - DNA, 20 bp, Artificial Sequence
  Description of Artificial Sequence: Synthetic oligonucleotide
  Target: LAMA2; (+) strand; PAM type: YTN; PAM sequence: TTA
taaaatttcattgaatgata

SEQ ID NO: 408809 - DNA, 20 bp, Artificial Sequence
  Description of Artificial Sequence: Synthetic oligonucleotide
  Target: LAMA2; (+) strand; PAM type: YTN; PAM sequence: TTT
cattgaatgataccaaagta

SEQ ID NO: 408810 - DNA, 20 bp, Artificial Sequence
  Description of Artificial Sequence: Synthetic oligonucleotide
  Target: LAMA2; (+) strand; PAM type: YTN; PAM sequence: TTC
attgaatgataccaaagtat

SEQ ID NO: 408811 - DNA, 20 bp, Artificial Sequence
  Description of Artificial Sequence: Synthetic oligonucleotide
  Target: LAMA2; (+) strand; PAM type: YTN; PAM sequence: TTG
aatgataccaaagtatttct

SEQ ID NO: 408812 - DNA, 20 bp, Artificial Sequence
  Description of Artificial Sequence: Synthetic oligonucleotide
  Target: LAMA2; (+) strand; PAM type: YTN; PAM sequence: TTT
ctcaatgattatagtcaata

SEQ ID NO: 408813 - DNA, 20 bp, Artificial Sequence
  Description of Artificial Sequence: Synthetic oligonucleotide
  Target: LAMA2; (+) strand; PAM type: YTN; PAM sequence: TTC
tcaatgattatagtcaataa

SEQ ID NO: 408814 - DNA, 20 bp, Artificial Sequence
  Description of Artificial Sequence: Synthetic oligonucleotide
  Target: LAMA2; (+) strand; PAM type: YTN; PAM sequence: CTC
aatgattatagtcaataaat

SEQ ID NO: 408815 - DNA, 20 bp, Artificial Sequence
  Description of Artificial Sequence: Synthetic oligonucleotide
  Target: LAMA2; (+) strand; PAM type: YTN; PAM sequence: TTA
tagtcaataaattggtatag

SEQ ID NO: 408816 - DNA, 20 bp, Artificial Sequence
  Description of Artificial Sequence: Synthetic oligonucleotide
  Target: LAMA2; (+) strand; PAM type: YTN; PAM sequence: TTG
gtatagtcaacatgttaatg

SEQ ID NO: 408817 - DNA, 20 bp, Artificial Sequence
  Description of Artificial Sequence: Synthetic oligonucleotide
  Target: LAMA2; (+) strand; PAM type: YTN; PAM sequence: TTA
atgaagatattaaagactca

SEQ ID NO: 408818 - DNA, 20 bp, Artificial Sequence
  Description of Artificial Sequence: Synthetic oligonucleotide
  Target: LAMA2; (+) strand; PAM type: YTN; PAM sequence: TTA
aagactcaatattaaaaata

SEQ ID NO: 408819 - DNA, 20 bp, Artificial Sequence
  Description of Artificial Sequence: Synthetic oligonucleotide
  Target: LAMA2; (+) strand; PAM type: YTN; PAM sequence: CTC
aatattaaaaatatgtcatt

SEQ ID NO: 408820 - DNA, 20 bp, Artificial Sequence
  Description of Artificial Sequence: Synthetic oligonucleotide
  Target: LAMA2; (+) strand; PAM type: YTN; PAM sequence: TTA
aaaatatgtcatttctcccc

SEQ ID NO: 408821 - DNA, 20 bp, Artificial Sequence
  Description of Artificial Sequence: Synthetic oligonucleotide
  Target: LAMA2; (+) strand; PAM type: YTN; PAM sequence: TTT
ctccccaaaatgatatgtag

SEQ ID NO: 408822 - DNA, 20 bp, Artificial Sequence
  Description of Artificial Sequence: Synthetic oligonucleotide
  Target: LAMA2; (+) strand; PAM type: YTN; PAM sequence: TTC
tccccaaaatgatatgtaga

SEQ ID NO: 408823 - DNA, 20 bp, Artificial Sequence
  Description of Artificial Sequence: Synthetic oligonucleotide
  Target: LAMA2; (+) strand; PAM type: YTN; PAM sequence: CTC
cccaaaatgatatgtagatt

SEQ ID NO: 408824 - DNA, 20 bp, Artificial Sequence
  Description of Artificial Sequence: Synthetic oligonucleotide
  Target: LAMA2; (+) strand; PAM type: YTN; PAM sequence: TTC
aattataataaaaatatcac

SEQ ID NO: 408825 - DNA, 20 bp, Artificial Sequence
  Description of Artificial Sequence: Synthetic oligonucleotide
  Target: LAMA2; (+) strand; PAM type: YTN; PAM sequence: TTA
taataaaaatatcaccttat

SEQ ID NO: 408826 - DNA, 20 bp, Artificial Sequence
  Description of Artificial Sequence: Synthetic oligonucleotide
  Target: LAMA2; (+) strand; PAM type: YTN; PAM sequence: CTT
atttttctgtgaatcatgac

SEQ ID NO: 408827 - DNA, 20 bp, Artificial Sequence
  Description of Artificial Sequence: Synthetic oligonucleotide
  Target: LAMA2; (+) strand; PAM type: YTN; PAM sequence: TTA
tttttctgtgaatcatgaca

SEQ ID NO: 408828 - DNA, 20 bp, Artificial Sequence
  Description of Artificial Sequence: Synthetic oligonucleotide
  Target: LAMA2; (+) strand; PAM type: YTN; PAM sequence: TTT
ttctgtgaatcatgacagct

SEQ ID NO: 408829 - DNA, 20 bp, Artificial Sequence
  Description of Artificial Sequence: Synthetic oligonucleotide
  Target: LAMA2; (+) strand; PAM type: YTN; PAM sequence: TTT
tctgtgaatcatgacagctt

SEQ ID NO: 408830 - DNA, 20 bp, Artificial Sequence
  Description of Artificial Sequence: Synthetic oligonucleotide
  Target: LAMA2; (+) strand; PAM type: YTN; PAM sequence: TTT
ctgtgaatcatgacagctta

SEQ ID NO: 408831 - DNA, 20 bp, Artificial Sequence
  Description of Artificial Sequence: Synthetic oligonucleotide
  Target: LAMA2; (+) strand; PAM type: YTN; PAM sequence: TTC
tgtgaatcatgacagcttat

SEQ ID NO: 408832 - DNA, 20 bp, Artificial Sequence
  Description of Artificial Sequence: Synthetic oligonucleotide
  Target: LAMA2; (+) strand; PAM type: YTN; PAM sequence: CTG
tgaatcatgacagcttattc

SEQ ID NO: 408833 - DNA, 20 bp, Artificial Sequence
  Description of Artificial Sequence: Synthetic oligonucleotide
  Target: LAMA2; (+) strand; PAM type: YTN; PAM sequence: CTT
attctaaaatttatatcaaa

SEQ ID NO: 408834 - DNA, 20 bp, Artificial Sequence
  Description of Artificial Sequence: Synthetic oligonucleotide
  Target: LAMA2; (+) strand; PAM type: YTN; PAM sequence: TTA
ttctaaaatttatatcaaag

SEQ ID NO: 408835 - DNA, 20 bp, Artificial Sequence
  Description of Artificial Sequence: Synthetic oligonucleotide
  Target: LAMA2; (+) strand; PAM type: YTN; PAM sequence: TTC
taaaatttatatcaaagatg

SEQ ID NO: 408836 - DNA, 20 bp, Artificial Sequence
  Description of Artificial Sequence: Synthetic oligonucleotide
  Target: LAMA2; (+) strand; PAM type: YTN; PAM sequence: CTA
aaatttatatcaaagatgaa

SEQ ID NO: 408837 - DNA, 20 bp, Artificial Sequence
  Description of Artificial Sequence: Synthetic oligonucleotide
  Target: LAMA2; (+) strand; PAM type: YTN; PAM sequence: TTT
atatcaaagatgaaattcct

SEQ ID NO: 408838 - DNA, 20 bp, Artificial Sequence
  Description of Artificial Sequence: Synthetic oligonucleotide
  Target: LAMA2; (+) strand; PAM type: YTN; PAM sequence: TTA
tatcaaagatgaaattccta

SEQ ID NO: 408839 - DNA, 20 bp, Artificial Sequence
  Description of Artificial Sequence: Synthetic oligonucleotide
  Target: LAMA2; (+) strand; PAM type: YTN; PAM sequence: TTC
ctagaatagaagaatagcgt

SEQ ID NO: 408840 - DNA, 20 bp, Artificial Sequence
  Description of Artificial Sequence: Synthetic oligonucleotide
  Target: LAMA2; (+) strand; PAM type: YTN; PAM sequence: CTA
gaatagaagaatagcgtagt

SEQ ID NO: 408841 - DNA, 20 bp, Artificial Sequence
  Description of Artificial Sequence: Synthetic oligonucleotide
  Target: LAMA2; (+) strand; PAM type: YTN; PAM sequence: TTG
gggctgttccaccagatatc

SEQ ID NO: 408842 - DNA, 20 bp, Artificial Sequence
  Description of Artificial Sequence: Synthetic oligonucleotide
  Target: LAMA2; (+) strand; PAM type: YTN; PAM sequence: CTG
ttccaccagatatcagcaca

SEQ ID NO: 408843 - DNA, 20 bp, Artificial Sequence
  Description of Artificial Sequence: Synthetic oligonucleotide
  Target: LAMA2; (+) strand; PAM type: YTN; PAM sequence: TTC
caccagatatcagcacatta

SEQ ID NO: 408844 - DNA, 20 bp, Artificial Sequence
  Description of Artificial Sequence: Synthetic oligonucleotide
  Target: LAMA2; (+) strand; PAM type: YTN; PAM sequence: TTA
gaaggtaaagttttgtattg

SEQ ID NO: 408845 - DNA, 20 bp, Artificial Sequence
  Description of Artificial Sequence: Synthetic oligonucleotide
  Target: LAMA2; (+) strand; PAM type: YTN; PAM sequence: TTT
tgtattgtggagctatcatg

SEQ ID NO: 408846 - DNA, 20 bp, Artificial Sequence
  Description of Artificial Sequence: Synthetic oligonucleotide
  Target: LAMA2; (+) strand; PAM type: YTN; PAM sequence: TTT
gtattgtggagctatcatgt

SEQ ID NO: 408847 - DNA, 20 bp, Artificial Sequence
  Description of Artificial Sequence: Synthetic oligonucleotide
  Target: LAMA2; (+) strand; PAM type: YTN; PAM sequence: TTG
tattgtggagctatcatgtt

SEQ ID NO: 408848 - DNA, 20 bp, Artificial Sequence
  Description of Artificial Sequence: Synthetic oligonucleotide
  Target: LAMA2; (+) strand; PAM type: YTN; PAM sequence: TTG
tggagctatcatgttaattc

SEQ ID NO: 408849 - DNA, 20 bp, Artificial Sequence
  Description of Artificial Sequence: Synthetic oligonucleotide
  Target: LAMA2; (+) strand; PAM type: YTN; PAM sequence: CTA
tcatgttaattcatgtataa

SEQ ID NO: 408850 - DNA, 20 bp, Artificial Sequence
  Description of Artificial Sequence: Synthetic oligonucleotide
  Target: LAMA2; (+) strand; PAM type: YTN; PAM sequence: TTA
attcatgtataactgtgcaa

SEQ ID NO: 408851 - DNA, 20 bp, Artificial Sequence
  Description of Artificial Sequence: Synthetic oligonucleotide
  Target: LAMA2; (+) strand; PAM type: YTN; PAM sequence: TTC
atgtataactgtgcaaatag

SEQ ID NO: 408852 - DNA, 20 bp, Artificial Sequence
  Description of Artificial Sequence: Synthetic oligonucleotide
  Target: LAMA2; (+) strand; PAM type: YTN; PAM sequence: CTG
tgcaaataggaaagaattga

SEQ ID NO: 408853 - DNA, 20 bp, Artificial Sequence
  Description of Artificial Sequence: Synthetic oligonucleotide
  Target: LAMA2; (+) strand; PAM type: YTN; PAM sequence: TTG
agaaccctgaaaatacacaa

SEQ ID NO: 408854 - DNA, 20 bp, Artificial Sequence
  Description of Artificial Sequence: Synthetic oligonucleotide
  Target: LAMA2; (+) strand; PAM type: YTN; PAM sequence: CTG
aaaatacacaagcatagatg

SEQ ID NO: 408855 - DNA, 20 bp, Artificial Sequence
  Description of Artificial Sequence: Synthetic oligonucleotide
  Target: LAMA2; (+) strand; PAM type: YTN; PAM sequence: TTT
gacaataagtggcattgcat

SEQ ID NO: 408856 - DNA, 20 bp, Artificial Sequence
  Description of Artificial Sequence: Synthetic oligonucleotide
  Target: LAMA2; (+) strand; PAM type: YTN; PAM sequence: TTG
acaataagtggcattgcatt

SEQ ID NO: 408857 - DNA, 20 bp, Artificial Sequence
  Description of Artificial Sequence: Synthetic oligonucleotide
  Target: LAMA2; (+) strand; PAM type: YTN; PAM sequence: TTG
catttcatttaaaaaagaca

SEQ ID NO: 408858 - DNA, 20 bp, Artificial Sequence
  Description of Artificial Sequence: Synthetic oligonucleotide
  Target: LAMA2; (+) strand; PAM type: YTN; PAM sequence: TTT
catttaaaaaagacaacagt

SEQ ID NO: 408859 - DNA, 20 bp, Artificial Sequence
  Description of Artificial Sequence: Synthetic oligonucleotide
  Target: LAMA2; (+) strand; PAM type: YTN; PAM sequence: TTC
atttaaaaaagacaacagtg

SEQ ID NO: 408860 - DNA, 20 bp, Artificial Sequence
  Description of Artificial Sequence: Synthetic oligonucleotide
  Target: LAMA2; (+) strand; PAM type: YTN; PAM sequence: TTT
aaaaaagacaacagtgaact

SEQ ID NO: 408861 - DNA, 20 bp, Artificial Sequence
  Description of Artificial Sequence: Synthetic oligonucleotide
  Target: LAMA2; (+) strand; PAM type: YTN; PAM sequence: TTA
aaaaagacaacagtgaactg

SEQ ID NO: 408862 - DNA, 20 bp, Artificial Sequence
  Description of Artificial Sequence: Synthetic oligonucleotide
  Target: LAMA2; (+) strand; PAM type: YTN; PAM sequence: CTG
ttcagtgaatgatttcaggg

SEQ ID NO: 408863 - DNA, 20 bp, Artificial Sequence
  Description of Artificial Sequence: Synthetic oligonucleotide
  Target: LAMA2; (+) strand; PAM type: YTN; PAM sequence: TTC
agtgaatgatttcagggcaa

SEQ ID NO: 408864 - DNA, 20 bp, Artificial Sequence
  Description of Artificial Sequence: Synthetic oligonucleotide
  Target: LAMA2; (+) strand; PAM type: YTN; PAM sequence: TTT
cagggcaattggttattcat

SEQ ID NO: 408865 - DNA, 20 bp, Artificial Sequence
  Description of Artificial Sequence: Synthetic oligonucleotide
  Target: LAMA2; (+) strand; PAM type: YTN; PAM sequence: TTC
agggcaattggttattcata

SEQ ID NO: 408866 - DNA, 20 bp, Artificial Sequence
  Description of Artificial Sequence: Synthetic oligonucleotide
  Target: LAMA2; (+) strand; PAM type: YTN; PAM sequence: TTG
gttattcatatggaaaagat

SEQ ID NO: 408867 - DNA, 20 bp, Artificial Sequence
  Description of Artificial Sequence: Synthetic oligonucleotide
  Target: LAMA2; (+) strand; PAM type: YTN; PAM sequence: TTA
ttcatatggaaaagatgaaa

SEQ ID NO: 408868 - DNA, 20 bp, Artificial Sequence
  Description of Artificial Sequence: Synthetic oligonucleotide
  Target: LAMA2; (+) strand; PAM type: YTN; PAM sequence: TTC
atatggaaaagatgaaacta

SEQ ID NO: 408869 - DNA, 20 bp, Artificial Sequence
  Description of Artificial Sequence: Synthetic oligonucleotide
  Target: LAMA2; (+) strand; PAM type: YTN; PAM sequence: CTA
aatttctttttcatatcaaa

SEQ ID NO: 408870 - DNA, 20 bp, Artificial Sequence
  Description of Artificial Sequence: Synthetic oligonucleotide
  Target: LAMA2; (+) strand; PAM type: YTN; PAM sequence: TTT
ctttttcatatcaaaccaaa

SEQ ID NO: 408871 - DNA, 20 bp, Artificial Sequence
  Description of Artificial Sequence: Synthetic oligonucleotide
  Target: LAMA2; (+) strand; PAM type: YTN; PAM sequence: TTC
tttttcatatcaaaccaaaa

SEQ ID NO: 408872 - DNA, 20 bp, Artificial Sequence
  Description of Artificial Sequence: Synthetic oligonucleotide
  Target: LAMA2; (+) strand; PAM type: YTN; PAM sequence: CTT
tttcatatcaaaccaaaaaa

SEQ ID NO: 408873 - DNA, 20 bp, Artificial Sequence
  Description of Artificial Sequence: Synthetic oligonucleotide
  Target: LAMA2; (+) strand; PAM type: YTN; PAM sequence: TTT
ttcatatcaaaccaaaaaat

SEQ ID NO: 408874 - DNA, 20 bp, Artificial Sequence
  Description of Artificial Sequence: Synthetic oligonucleotide
  Target: LAMA2; (+) strand; PAM type: YTN; PAM sequence: TTT
tcatatcaaaccaaaaaata

SEQ ID NO: 408875 - DNA, 20 bp, Artificial Sequence
  Description of Artificial Sequence: Synthetic oligonucleotide
  Target: LAMA2; (+) strand; PAM type: YTN; PAM sequence: TTT
catatcaaaccaaaaaataa

SEQ ID NO: 408876 - DNA, 20 bp, Artificial Sequence
  Description of Artificial Sequence: Synthetic oligonucleotide
  Target: LAMA2; (+) strand; PAM type: YTN; PAM sequence: TTC
atatcaaaccaaaaaataaa

SEQ ID NO: 408877 - DNA, 20 bp, Artificial Sequence
  Description of Artificial Sequence: Synthetic oligonucleotide
  Target: LAMA2; (+) strand; PAM type: YTN; PAM sequence: TTC
acaataaattaaagtcttaa

SEQ ID NO: 408878 - DNA, 20 bp, Artificial Sequence
  Description of Artificial Sequence: Synthetic oligonucleotide
  Target: LAMA2; (+) strand; PAM type: YTN; PAM sequence: TTA
aagtcttaaatatggaagga

SEQ ID NO: 408879 - DNA, 20 bp, Artificial Sequence
  Description of Artificial Sequence: Synthetic oligonucleotide
  Target: LAMA2; (+) strand; PAM type: YTN; PAM sequence: CTT
aaatatggaaggacaaaaat

SEQ ID NO: 408880 - DNA, 20 bp, Artificial Sequence
  Description of Artificial Sequence: Synthetic oligonucleotide
  Target: LAMA2; (+) strand; PAM type: YTN; PAM sequence: TTA
aatatggaaggacaaaaatc

SEQ ID NO: 408881 - DNA, 20 bp, Artificial Sequence
  Description of Artificial Sequence: Synthetic oligonucleotide
  Target: LAMA2; (+) strand; PAM type: YTN; PAM sequence: CTT
taaaattcttagaagaaaat

SEQ ID NO: 408882 - DNA, 20 bp, Artificial Sequence
  Description of Artificial Sequence: Synthetic oligonucleotide
  Target: LAMA2; (+) strand; PAM type: YTN; PAM sequence: TTT
aaaattcttagaagaaaata

SEQ ID NO: 408883 - DNA, 20 bp, Artificial Sequence
  Description of Artificial Sequence: Synthetic oligonucleotide
  Target: LAMA2; (+) strand; PAM type: YTN; PAM sequence: TTA
aaattcttagaagaaaatat

SEQ ID NO: 408884 - DNA, 20 bp, Artificial Sequence
  Description of Artificial Sequence: Synthetic oligonucleotide
  Target: LAMA2; (+) strand; PAM type: YTN; PAM sequence: TTC
ttagaagaaaatataccagg

SEQ ID NO: 408885 - DNA, 20 bp, Artificial Sequence
  Description of Artificial Sequence: Synthetic oligonucleotide
  Target: LAMA2; (+) strand; PAM type: YTN; PAM sequence: CTT
agaagaaaatataccaggat

SEQ ID NO: 408886 - DNA, 20 bp, Artificial Sequence
  Description of Artificial Sequence: Synthetic oligonucleotide
  Target: LAMA2; (+) strand; PAM type: YTN; PAM sequence: TTA
gaagaaaatataccaggatt

SEQ ID NO: 408887 - DNA, 20 bp, Artificial Sequence
  Description of Artificial Sequence: Synthetic oligonucleotide
  Target: LAMA2; (+) strand; PAM type: YTN; PAM sequence: TTA
aattttgaccttcgggaaaa

SEQ ID NO: 408888 - DNA, 20 bp, Artificial Sequence
  Description of Artificial Sequence: Synthetic oligonucleotide
  Target: LAMA2; (+) strand; PAM type: YTN; PAM sequence: TTT
tgaccttcgggaaaagaaca

SEQ ID NO: 408889 - DNA, 20 bp, Artificial Sequence
  Description of Artificial Sequence: Synthetic oligonucleotide
  Target: LAMA2; (+) strand; PAM type: YTN; PAM sequence: TTT
gaccttcgggaaaagaacac

SEQ ID NO: 408890 - DNA, 20 bp, Artificial Sequence
  Description of Artificial Sequence: Synthetic oligonucleotide
  Target: LAMA2; (+) strand; PAM type: YTN; PAM sequence: TTG
accttcgggaaaagaacact

SEQ ID NO: 408891 - DNA, 20 bp, Artificial Sequence
  Description of Artificial Sequence: Synthetic oligonucleotide
  Target: LAMA2; (+) strand; PAM type: YTN; PAM sequence: CTT
cgggaaaagaacacttgatt

SEQ ID NO: 408892 - DNA, 20 bp, Artificial Sequence
  Description of Artificial Sequence: Synthetic oligonucleotide
  Target: LAMA2; (+) strand; PAM type: YTN; PAM sequence: TTC
gggaaaagaacacttgattg

SEQ ID NO: 408893 - DNA, 20 bp, Artificial Sequence
  Description of Artificial Sequence: Synthetic oligonucleotide
  Target: LAMA2; (+) strand; PAM type: YTN; PAM sequence: CTT
gattgaacaaaacaagatta

SEQ ID NO: 408894 - DNA, 20 bp, Artificial Sequence
  Description of Artificial Sequence: Synthetic oligonucleotide
  Target: LAMA2; (+) strand; PAM type: YTN; PAM sequence: TTG
attgaacaaaacaagattat

SEQ ID NO: 408895 - DNA, 20 bp, Artificial Sequence
  Description of Artificial Sequence: Synthetic oligonucleotide
  Target: LAMA2; (+) strand; PAM type: YTN; PAM sequence: TTG
aacaaaacaagattatgagt

SEQ ID NO: 408896 - DNA, 20 bp, Artificial Sequence
  Description of Artificial Sequence: Synthetic oligonucleotide
  Target: LAMA2; (+) strand; PAM type: YTN; PAM sequence: TTA
tgagtggaactgcattaaaa

SEQ ID NO: 408897 - DNA, 20 bp, Artificial Sequence
  Description of Artificial Sequence: Synthetic oligonucleotide
  Target: LAMA2; (+) strand; PAM type: YTN; PAM sequence: CTG
cattaaaattaaactctttg

SEQ ID NO: 408898 - DNA, 20 bp, Artificial Sequence
  Description of Artificial Sequence: Synthetic oligonucleotide
  Target: LAMA2; (+) strand; PAM type: YTN; PAM sequence: TTA
aaattaaactctttggtcat

SEQ ID NO: 408899 - DNA, 20 bp, Artificial Sequence
  Description of Artificial Sequence: Synthetic oligonucleotide
  Target: LAMA2; (+) strand; PAM type: YTN; PAM sequence: TTA
aactctttggtcatcaaaca

SEQ ID NO: 408900 - DNA, 20 bp, Artificial Sequence
  Description of Artificial Sequence: Synthetic oligonucleotide
  Target: LAMA2; (+) strand; PAM type: YTN; PAM sequence: CTC
tttggtcatcaaacaacaca

SEQ ID NO: 408901 - DNA, 20 bp, Artificial Sequence
  Description of Artificial Sequence: Synthetic oligonucleotide
  Target: LAMA2; (+) strand; PAM type: YTN; PAM sequence: CTT
tggtcatcaaacaacacaaa

SEQ ID NO: 408902 - DNA, 20 bp, Artificial Sequence
  Description of Artificial Sequence: Synthetic oligonucleotide
  Target: LAMA2; (+) strand; PAM type: YTN; PAM sequence: TTT
ggtcatcaaacaacacaaaa

SEQ ID NO: 408903 - DNA, 20 bp, Artificial Sequence
  Description of Artificial Sequence: Synthetic oligonucleotide
  Target: LAMA2; (+) strand; PAM type: YTN; PAM sequence: TTG
gtcatcaaacaacacaaaac

SEQ ID NO: 408904 - DNA, 20 bp, Artificial Sequence
  Description of Artificial Sequence: Synthetic oligonucleotide
  Target: LAMA2; (+) strand; PAM type: YTN; PAM sequence: CTC
agtctggaaatgtacagtat

SEQ ID NO: 408905 - DNA, 20 bp, Artificial Sequence
  Description of Artificial Sequence: Synthetic oligonucleotide
  Target: LAMA2; (+) strand; PAM type: YTN; PAM sequence: CTG
gaaatgtacagtatatataa

SEQ ID NO: 408906 - DNA, 20 bp, Artificial Sequence
  Description of Artificial Sequence: Synthetic oligonucleotide
  Target: LAMA2; (+) strand; PAM type: YTN; PAM sequence: CTA
cagggaatacagtccttgtc

SEQ ID NO: 408907 - DNA, 20 bp, Artificial Sequence
  Description of Artificial Sequence: Synthetic oligonucleotide
  Target: LAMA2; (+) strand; PAM type: YTN; PAM sequence: CTT
gtccccaaaaggggaaaagc

SEQ ID NO: 408908 - DNA, 20 bp, Artificial Sequence
  Description of Artificial Sequence: Synthetic oligonucleotide
  Target: LAMA2; (+) strand; PAM type: YTN; PAM sequence: TTG
tccccaaaaggggaaaagct

SEQ ID NO: 408909 - DNA, 20 bp, Artificial Sequence
  Description of Artificial Sequence: Synthetic oligonucleotide
  Target: LAMA2; (+) strand; PAM type: YTN; PAM sequence: CTC
actgcagtttataatgggat

SEQ ID NO: 408910 - DNA, 20 bp, Artificial Sequence
  Description of Artificial Sequence: Synthetic oligonucleotide
  Target: LAMA2; (+) strand; PAM type: YTN; PAM sequence: CTG
cagtttataatgggatatcg

SEQ ID NO: 408911 - DNA, 20 bp, Artificial Sequence
  Description of Artificial Sequence: Synthetic oligonucleotide
  Target: LAMA2; (+) strand; PAM type: YTN; PAM sequence: TTT
ataatgggatatcgaaacca

SEQ ID NO: 408912 - DNA, 20 bp, Artificial Sequence
  Description of Artificial Sequence: Synthetic oligonucleotide
  Target: LAMA2; (+) strand; PAM type: YTN; PAM sequence: TTA
taatgggatatcgaaaccat

SEQ ID NO: 408913 - DNA, 20 bp, Artificial Sequence
  Description of Artificial Sequence: Synthetic oligonucleotide
  Target: LAMA2; (+) strand; PAM type: YTN; PAM sequence: CTG
gttgttatagtattagaaag

SEQ ID NO: 408914 - DNA, 20 bp, Artificial Sequence
  Description of Artificial Sequence: Synthetic oligonucleotide
  Target: LAMA2; (+) strand; PAM type: YTN; PAM sequence: TTG
ttatagtattagaaagaaca

SEQ ID NO: 408915 - DNA, 20 bp, Artificial Sequence
  Description of Artificial Sequence: Synthetic oligonucleotide
  Target: LAMA2; (+) strand; PAM type: YTN; PAM sequence: TTA
tagtattagaaagaacagta

SEQ ID NO: 408916 - DNA, 20 bp, Artificial Sequence
  Description of Artificial Sequence: Synthetic oligonucleotide
  Target: LAMA2; (+) strand; PAM type: YTN; PAM sequence: TTA
gaaagaacagtattggaaag

SEQ ID NO: 408917 - DNA, 20 bp, Artificial Sequence
  Description of Artificial Sequence: Synthetic oligonucleotide
  Target: LAMA2; (+) strand; PAM type: YTN; PAM sequence: TTG
gaaagatgtgaatcaaagag

SEQ ID NO: 408918 - DNA, 20 bp, Artificial Sequence
  Description of Artificial Sequence: Synthetic oligonucleotide
  Target: LAMA2; (+) strand; PAM type: YTN; PAM sequence: CTT
gatcactgctggtagaaaaa

SEQ ID NO: 408919 - DNA, 20 bp, Artificial Sequence
  Description of Artificial Sequence: Synthetic oligonucleotide
  Target: LAMA2; (+) strand; PAM type: YTN; PAM sequence: TTG
atcactgctggtagaaaaag

SEQ ID NO: 408920 - DNA, 20 bp, Artificial Sequence
  Description of Artificial Sequence: Synthetic oligonucleotide
  Target: LAMA2; (+) strand; PAM type: YTN; PAM sequence: CTG
ctggtagaaaaagtaaattt

SEQ ID NO: 408921 - DNA, 20 bp, Artificial Sequence
  Description of Artificial Sequence: Synthetic oligonucleotide
  Target: LAMA2; (+) strand; PAM type: YTN; PAM sequence: CTG
gtagaaaaagtaaatttcta

SEQ ID NO: 408922 - DNA, 20 bp, Artificial Sequence
  Description of Artificial Sequence: Synthetic oligonucleotide
  Target: LAMA2; (+) strand; PAM type: YTN; PAM sequence: TTT
ctaaagtcactttggaaaac

SEQ ID NO: 408923 - DNA, 20 bp, Artificial Sequence
  Description of Artificial Sequence: Synthetic oligonucleotide
  Target: LAMA2; (+) strand; PAM type: YTN; PAM sequence: TTC
taaagtcactttggaaaaca

SEQ ID NO: 408924 - DNA, 20 bp, Artificial Sequence
  Description of Artificial Sequence: Synthetic oligonucleotide
  Target: LAMA2; (+) strand; PAM type: YTN; PAM sequence: CTA
aagtcactttggaaaacaat

SEQ ID NO: 408925 - DNA, 20 bp, Artificial Sequence
  Description of Artificial Sequence: Synthetic oligonucleotide
  Target: LAMA2; (+) strand; PAM type: YTN; PAM sequence: CTT
tggaaaacaatttggcacta

SEQ ID NO: 408926 - DNA, 20 bp, Artificial Sequence
  Description of Artificial Sequence: Synthetic oligonucleotide
  Target: LAMA2; (+) strand; PAM type: YTN; PAM sequence: TTT
ggaaaacaatttggcactat

SEQ ID NO: 408927 - DNA, 20 bp, Artificial Sequence
  Description of Artificial Sequence: Synthetic oligonucleotide
  Target: LAMA2; (+) strand; PAM type: YTN; PAM sequence: TTG
gaaaacaatttggcactatc

SEQ ID NO: 408928 - DNA, 20 bp, Artificial Sequence
  Description of Artificial Sequence: Synthetic oligonucleotide
  Target: LAMA2; (+) strand; PAM type: YTN; PAM sequence: TTT
ggcactatctcctgaagttg

SEQ ID NO: 408929 - DNA, 20 bp, Artificial Sequence
  Description of Artificial Sequence: Synthetic oligonucleotide
  Target: LAMA2; (+) strand; PAM type: YTN; PAM sequence: TTG
gcactatctcctgaagttga

SEQ ID NO: 408930 - DNA, 20 bp, Artificial Sequence
  Description of Artificial Sequence: Synthetic oligonucleotide
  Target: LAMA2; (+) strand; PAM type: YTN; PAM sequence: CTA
tctcctgaagttgaacatgt

SEQ ID NO: 408931 - DNA, 20 bp, Artificial Sequence
  Description of Artificial Sequence: Synthetic oligonucleotide
  Target: LAMA2; (+) strand; PAM type: YTN; PAM sequence: CTC
ctgaagttgaacatgtgcat

SEQ ID NO: 408932 - DNA, 20 bp, Artificial Sequence
  Description of Artificial Sequence: Synthetic oligonucleotide
  Target: LAMA2; (+) strand; PAM type: YTN; PAM sequence: CTG
aagttgaacatgtgcatact

SEQ ID NO: 408933 - DNA, 20 bp, Artificial Sequence
  Description of Artificial Sequence: Synthetic oligonucleotide
  Target: LAMA2; (+) strand; PAM type: YTN; PAM sequence: TTG
aacatgtgcatactctctac

SEQ ID NO: 408934 - DNA, 20 bp, Artificial Sequence
  Description of Artificial Sequence: Synthetic oligonucleotide
  Target: LAMA2; (+) strand; PAM type: YTN; PAM sequence: CTC
tctacaagccagcaattcca

SEQ ID NO: 408935 - DNA, 20 bp, Artificial Sequence
  Description of Artificial Sequence: Synthetic oligonucleotide
  Target: LAMA2; (+) strand; PAM type: YTN; PAM sequence: CTC
tacaagccagcaattccact

SEQ ID NO: 408936 - DNA, 20 bp, Artificial Sequence
  Description of Artificial Sequence: Synthetic oligonucleotide
  Target: LAMA2; (+) strand; PAM type: YTN; PAM sequence: CTA
caagccagcaattccactcc

SEQ ID NO: 408937 - DNA, 20 bp, Artificial Sequence
  Description of Artificial Sequence: Synthetic oligonucleotide
  Target: LAMA2; (+) strand; PAM type: YTN; PAM sequence: TTC
cactcctgggtacagaccca

SEQ ID NO: 408938 - DNA, 20 bp, Artificial Sequence
  Description of Artificial Sequence: Synthetic oligonucleotide
  Target: LAMA2; (+) strand; PAM type: YTN; PAM sequence: CTC
ctgggtacagacccagattt

SEQ ID NO: 408939 - DNA, 20 bp, Artificial Sequence
  Description of Artificial Sequence: Synthetic oligonucleotide
  Target: LAMA2; (+) strand; PAM type: YTN; PAM sequence: CTG
ggtacagacccagatttttg

SEQ ID NO: 408940 - DNA, 20 bp, Artificial Sequence
  Description of Artificial Sequence: Synthetic oligonucleotide
  Target: LAMA2; (+) strand; PAM type: YTN; PAM sequence: TTT
ttgcacatgggcataataag

SEQ ID NO: 408941 - DNA, 20 bp, Artificial Sequence
  Description of Artificial Sequence: Synthetic oligonucleotide
  Target: LAMA2; (+) strand; PAM type: YTN; PAM sequence: TTT
tgcacatgggcataataaga

SEQ ID NO: 408942 - DNA, 20 bp, Artificial Sequence
  Description of Artificial Sequence: Synthetic oligonucleotide
  Target: LAMA2; (+) strand; PAM type: YTN; PAM sequence: TTT
gcacatgggcataataagac

SEQ ID NO: 408943 - DNA, 20 bp, Artificial Sequence
  Description of Artificial Sequence: Synthetic oligonucleotide
  Target: LAMA2; (+) strand; PAM type: YTN; PAM sequence: TTG
cacatgggcataataagaca

SEQ ID NO: 408944 - DNA, 20 bp, Artificial Sequence
  Description of Artificial Sequence: Synthetic oligonucleotide
  Target: LAMA2; (+) strand; PAM type: YTN; PAM sequence: TTT
atagaagtattctttataat

SEQ ID NO: 408945 - DNA, 20 bp, Artificial Sequence
  Description of Artificial Sequence: Synthetic oligonucleotide
  Target: LAMA2; (+) strand; PAM type: YTN; PAM sequence: TTA
tagaagtattctttataata

SEQ ID NO: 408946 - DNA, 20 bp, Artificial Sequence
  Description of Artificial Sequence: Synthetic oligonucleotide
  Target: LAMA2; (+) strand; PAM type: YTN; PAM sequence: TTC
tttataatagcagagaaact

SEQ ID NO: 408947 - DNA, 20 bp, Artificial Sequence
  Description of Artificial Sequence: Synthetic oligonucleotide
  Target: LAMA2; (+) strand; PAM type: YTN; PAM sequence: CTT
tataatagcagagaaactag

SEQ ID NO: 408948 - DNA, 20 bp, Artificial Sequence
  Description of Artificial Sequence: Synthetic oligonucleotide
  Target: LAMA2; (+) strand; PAM type: YTN; PAM sequence: TTT
ataatagcagagaaactaga

SEQ ID NO: 408949 - DNA, 20 bp, Artificial Sequence
  Description of Artificial Sequence: Synthetic oligonucleotide
  Target: LAMA2; (+) strand; PAM type: YTN; PAM sequence: TTA
taatagcagagaaactagaa

SEQ ID NO: 408950 - DNA, 20 bp, Artificial Sequence
  Description of Artificial Sequence: Synthetic oligonucleotide
  Target: LAMA2; (+) strand; PAM type: YTN; PAM sequence: CTA
gaaacaacccaagtgttcat

SEQ ID NO: 408951 - DNA, 20 bp, Artificial Sequence
  Description of Artificial Sequence: Synthetic oligonucleotide
  Target: LAMA2; (+) strand; PAM type: YTN; PAM sequence: TTC
atcagctggagaacagagag

SEQ ID NO: 408952 - DNA, 20 bp, Artificial Sequence
  Description of Artificial Sequence: Synthetic oligonucleotide
  Target: LAMA2; (+) strand; PAM type: YTN; PAM sequence: CTG
gagaacagagaggcaaactg

SEQ ID NO: 408953 - DNA, 20 bp, Artificial Sequence
  Description of Artificial Sequence: Synthetic oligonucleotide
  Target: LAMA2; (+) strand; PAM type: YTN; PAM sequence: CTG
tggcacttttgcataatggg

SEQ ID NO: 408954 - DNA, 20 bp, Artificial Sequence
  Description of Artificial Sequence: Synthetic oligonucleotide
  Target: LAMA2; (+) strand; PAM type: YTN; PAM sequence: CTT
ttgcataatgggatatcaag

SEQ ID NO: 408955 - DNA, 20 bp, Artificial Sequence
  Description of Artificial Sequence: Synthetic oligonucleotide
  Target: LAMA2; (+) strand; PAM type: YTN; PAM sequence: TTT
tgcataatgggatatcaagg

SEQ ID NO: 408956 - DNA, 20 bp, Artificial Sequence
  Description of Artificial Sequence: Synthetic oligonucleotide
  Target: LAMA2; (+) strand; PAM type: YTN; PAM sequence: TTT
gcataatgggatatcaagga

SEQ ID NO: 408957 - DNA, 20 bp, Artificial Sequence
  Description of Artificial Sequence: Synthetic oligonucleotide
  Target: LAMA2; (+) strand; PAM type: YTN; PAM sequence: TTG
cataatgggatatcaaggaa

SEQ ID NO: 408958 - DNA, 20 bp, Artificial Sequence
  Description of Artificial Sequence: Synthetic oligonucleotide
  Target: LAMA2; (+) strand; PAM type: YTN; PAM sequence: TTA
taactaaatataacaacata

SEQ ID NO: 408959 - DNA, 20 bp, Artificial Sequence
  Description of Artificial Sequence: Synthetic oligonucleotide
  Target: LAMA2; (+) strand; PAM type: YTN; PAM sequence: CTA
aatataacaacataataaat

SEQ ID NO: 408960 - DNA, 20 bp, Artificial Sequence
  Description of Artificial Sequence: Synthetic oligonucleotide
  Target: LAMA2; (+) strand; PAM type: YTN; PAM sequence: CTA
tatggtaccatttttgtaga

SEQ ID NO: 408961 - DNA, 20 bp, Artificial Sequence
  Description of Artificial Sequence: Synthetic oligonucleotide
  Target: LAMA2; (+) strand; PAM type: YTN; PAM sequence: TTT
ttgtagatttctcatacaag

SEQ ID NO: 408962 - DNA, 20 bp, Artificial Sequence
  Description of Artificial Sequence: Synthetic oligonucleotide
  Target: LAMA2; (+) strand; PAM type: YTN; PAM sequence: TTT
tgtagatttctcatacaagt

SEQ ID NO: 408963 - DNA, 20 bp, Artificial Sequence
  Description of Artificial Sequence: Synthetic oligonucleotide
  Target: LAMA2; (+) strand; PAM type: YTN; PAM sequence: TTT
gtagatttctcatacaagta

SEQ ID NO: 408964 - DNA, 20 bp, Artificial Sequence
  Description of Artificial Sequence: Synthetic oligonucleotide
  Target: LAMA2; (+) strand; PAM type: YTN; PAM sequence: TTG
tagatttctcatacaagtag

SEQ ID NO: 408965 - DNA, 20 bp, Artificial Sequence
  Description of Artificial Sequence: Synthetic oligonucleotide
  Target: LAMA2; (+) strand; PAM type: YTN; PAM sequence: TTT
ctcatacaagtagcactaaa

SEQ ID NO: 408966 - DNA, 20 bp, Artificial Sequence
  Description of Artificial Sequence: Synthetic oligonucleotide
  Target: LAMA2; (+) strand; PAM type: YTN; PAM sequence: TTC
tcatacaagtagcactaaac

SEQ ID NO: 408967 - DNA, 20 bp, Artificial Sequence
  Description of Artificial Sequence: Synthetic oligonucleotide
  Target: LAMA2; (+) strand; PAM type: YTN; PAM sequence: CTC
atacaagtagcactaaacaa

SEQ ID NO: 408968 - DNA, 20 bp, Artificial Sequence
  Description of Artificial Sequence: Synthetic oligonucleotide
  Target: LAMA2; (+) strand; PAM type: YTN; PAM sequence: CTA
aacaacatattgtttacaga

SEQ ID NO: 408969 - DNA, 20 bp, Artificial Sequence
  Description of Artificial Sequence: Synthetic oligonucleotide
  Target: LAMA2; (+) strand; PAM type: YTN; PAM sequence: TTG
tttacagacacatgtgaatt

SEQ ID NO: 408970 - DNA, 20 bp, Artificial Sequence
  Description of Artificial Sequence: Synthetic oligonucleotide
  Target: LAMA2; (+) strand; PAM type: YTN; PAM sequence: TTT
acagacacatgtgaatttca

SEQ ID NO: 408971 - DNA, 20 bp, Artificial Sequence
  Description of Artificial Sequence: Synthetic oligonucleotide
  Target: LAMA2; (+) strand; PAM type: YTN; PAM sequence: TTA
cagacacatgtgaatttcaa

SEQ ID NO: 408972 - DNA, 20 bp, Artificial Sequence
  Description of Artificial Sequence: Synthetic oligonucleotide
  Target: LAMA2; (+) strand; PAM type: YTN; PAM sequence: TTT
caaaaatattttttaaaagt

SEQ ID NO: 408973 - DNA, 20 bp, Artificial Sequence
  Description of Artificial Sequence: Synthetic oligonucleotide
  Target: LAMA2; (+) strand; PAM type: YTN; PAM sequence: TTC
aaaaatattttttaaaagta

SEQ ID NO: 408974 - DNA, 20 bp, Artificial Sequence
  Description of Artificial Sequence: Synthetic oligonucleotide
  Target: LAMA2; (+) strand; PAM type: YTN; PAM sequence: TTT
tttaaaagtaaggtaatgat

SEQ ID NO: 408975 - DNA, 20 bp, Artificial Sequence
  Description of Artificial Sequence: Synthetic oligonucleotide
  Target: LAMA2; (+) strand; PAM type: YTN; PAM sequence: TTT
ttaaaagtaaggtaatgata

SEQ ID NO: 408976 - DNA, 20 bp, Artificial Sequence
  Description of Artificial Sequence: Synthetic oligonucleotide
  Target: LAMA2; (+) strand; PAM type: YTN; PAM sequence: TTT
taaaagtaaggtaatgataa

SEQ ID NO: 408977 - DNA, 20 bp, Artificial Sequence
  Description of Artificial Sequence: Synthetic oligonucleotide
  Target: LAMA2; (+) strand; PAM type: YTN; PAM sequence: TTT
aaaagtaaggtaatgataaa

SEQ ID NO: 408978 - DNA, 20 bp, Artificial Sequence
  Description of Artificial Sequence: Synthetic oligonucleotide
  Target: LAMA2; (+) strand; PAM type: YTN; PAM sequence: TTA
aaagtaaggtaatgataaac

SEQ ID NO: 408979 - DNA, 20 bp, Artificial Sequence
  Description of Artificial Sequence: Synthetic oligonucleotide
  Target: LAMA2; (+) strand; PAM type: YTN; PAM sequence: TTT
gtggttacctctgagatgga

SEQ ID NO: 408980 - DNA, 20 bp, Artificial Sequence
  Description of Artificial Sequence: Synthetic oligonucleotide
  Target: LAMA2; (+) strand; PAM type: YTN; PAM sequence: TTG
tggttacctctgagatggag

SEQ ID NO: 408981 - DNA, 20 bp, Artificial Sequence
  Description of Artificial Sequence: Synthetic oligonucleotide
  Target: LAMA2; (+) strand; PAM type: YTN; PAM sequence: TTA
cctctgagatggagaagcaa

SEQ ID NO: 408982 - DNA, 20 bp, Artificial Sequence
  Description of Artificial Sequence: Synthetic oligonucleotide
  Target: LAMA2; (+) strand; PAM type: YTN; PAM sequence: CTC
tgagatggagaagcaaggag

SEQ ID NO: 408983 - DNA, 20 bp, Artificial Sequence
  Description of Artificial Sequence: Synthetic oligonucleotide
  Target: LAMA2; (+) strand; PAM type: YTN; PAM sequence: CTG
agatggagaagcaaggagat

SEQ ID NO: 408984 - DNA, 20 bp, Artificial Sequence
  Description of Artificial Sequence: Synthetic oligonucleotide
  Target: LAMA2; (+) strand; PAM type: YTN; PAM sequence: TTA
gaaagaaactcataagagat

SEQ ID NO: 408985 - DNA, 20 bp, Artificial Sequence
  Description of Artificial Sequence: Synthetic oligonucleotide
  Target: LAMA2; (+) strand; PAM type: YTN; PAM sequence: CTC
ataagagatgcaatggtatt

SEQ ID NO: 408986 - DNA, 20 bp, Artificial Sequence
  Description of Artificial Sequence: Synthetic oligonucleotide
  Target: LAMA2; (+) strand; PAM type: YTN; PAM sequence: TTG
tttctgaaatttggtggtag

SEQ ID NO: 408987 - DNA, 20 bp, Artificial Sequence
  Description of Artificial Sequence: Synthetic oligonucleotide
  Target: LAMA2; (+) strand; PAM type: YTN; PAM sequence: TTT
ctgaaatttggtggtagatt

SEQ ID NO: 408988 - DNA, 20 bp, Artificial Sequence
  Description of Artificial Sequence: Synthetic oligonucleotide
  Target: LAMA2; (+) strand; PAM type: YTN; PAM sequence: TTC
tgaaatttggtggtagattt

SEQ ID NO: 408989 - DNA, 20 bp, Artificial Sequence
  Description of Artificial Sequence: Synthetic oligonucleotide
  Target: LAMA2; (+) strand; PAM type: YTN; PAM sequence: CTG
aaatttggtggtagatttac

SEQ ID NO: 408990 - DNA, 20 bp, Artificial Sequence
  Description of Artificial Sequence: Synthetic oligonucleotide
  Target: LAMA2; (+) strand; PAM type: YTN; PAM sequence: TTT
ggtggtagatttacaggtat

SEQ ID NO: 408991 - DNA, 20 bp, Artificial Sequence
  Description of Artificial Sequence: Synthetic oligonucleotide
  Target: LAMA2; (+) strand; PAM type: YTN; PAM sequence: TTG
gtggtagatttacaggtatt

SEQ ID NO: 408992 - DNA, 20 bp, Artificial Sequence
  Description of Artificial Sequence: Synthetic oligonucleotide
  Target: LAMA2; (+) strand; PAM type: YTN; PAM sequence: TTT
acaggtattcatgttattat

SEQ ID NO: 408993 - DNA, 20 bp, Artificial Sequence
  Description of Artificial Sequence: Synthetic oligonucleotide
  Target: LAMA2; (+) strand; PAM type: YTN; PAM sequence: TTA
caggtattcatgttattata

SEQ ID NO: 408994 - DNA, 20 bp, Artificial Sequence
  Description of Artificial Sequence: Synthetic oligonucleotide
  Target: LAMA2; (+) strand; PAM type: YTN; PAM sequence: TTC
atgttattatacagtgttaa

SEQ ID NO: 408995 - DNA, 20 bp, Artificial Sequence
  Description of Artificial Sequence: Synthetic oligonucleotide
  Target: LAMA2; (+) strand; PAM type: YTN; PAM sequence: TTA
ttatacagtgttaacgcagc

SEQ ID NO: 408996 - DNA, 20 bp, Artificial Sequence
  Description of Artificial Sequence: Synthetic oligonucleotide
  Target: LAMA2; (+) strand; PAM type: YTN; PAM sequence: TTA
tacagtgttaacgcagcttc

SEQ ID NO: 408997 - DNA, 20 bp, Artificial Sequence
  Description of Artificial Sequence: Synthetic oligonucleotide
  Target: LAMA2; (+) strand; PAM type: YTN; PAM sequence: TTA
acgcagcttcatcgtttaca

SEQ ID NO: 408998 - DNA, 20 bp, Artificial Sequence
  Description of Artificial Sequence: Synthetic oligonucleotide
  Target: LAMA2; (+) strand; PAM type: YTN; PAM sequence: CTT
catcgtttacatgtatatca

SEQ ID NO: 408999 - DNA, 20 bp, Artificial Sequence
  Description of Artificial Sequence: Synthetic oligonucleotide
  Target: LAMA2; (+) strand; PAM type: YTN; PAM sequence: TTC
atcgtttacatgtatatcac

SEQ ID NO: 409000 - DNA, 20 bp, Artificial Sequence
  Description of Artificial Sequence: Synthetic oligonucleotide
  Target: LAMA2; (+) strand; PAM type: YTN; PAM sequence: TTT
acatgtatatcactcatatt

SEQ ID NO: 409001 - DNA, 20 bp, Artificial Sequence
  Description of Artificial Sequence: Synthetic oligonucleotide
  Target: LAMA2; (+) strand; PAM type: YTN; PAM sequence: TTA
catgtatatcactcatattg

SEQ ID NO: 409002 - DNA, 20 bp, Artificial Sequence
  Description of Artificial Sequence: Synthetic oligonucleotide
  Target: LAMA2; (+) strand; PAM type: YTN; PAM sequence: CTC
atattgtgaagaatatatca

SEQ ID NO: 409003 - DNA, 20 bp, Artificial Sequence
  Description of Artificial Sequence: Synthetic oligonucleotide
  Target: LAMA2; (+) strand; PAM type: YTN; PAM sequence: TTG
tgaagaatatatcaaatagt

SEQ ID NO: 409004 - DNA, 20 bp, Artificial Sequence
  Description of Artificial Sequence: Synthetic oligonucleotide
  Target: LAMA2; (+) strand; PAM type: YTN; PAM sequence: TTT
ttgaagagtagagggagaaa

SEQ ID NO: 409005 - DNA, 20 bp, Artificial Sequence
  Description of Artificial Sequence: Synthetic oligonucleotide
  Target: LAMA2; (+) strand; PAM type: YTN; PAM sequence: TTT
tgaagagtagagggagaaaa

SEQ ID NO: 409006 - DNA, 20 bp, Artificial Sequence
  Description of Artificial Sequence: Synthetic oligonucleotide
  Target: LAMA2; (+) strand; PAM type: YTN; PAM sequence: TTT
gaagagtagagggagaaaag

SEQ ID NO: 409007 - DNA, 20 bp, Artificial Sequence
  Description of Artificial Sequence: Synthetic oligonucleotide
  Target: LAMA2; (+) strand; PAM type: YTN; PAM sequence: TTG
aagagtagagggagaaaagt

SEQ ID NO: 409008 - DNA, 20 bp, Artificial Sequence
  Description of Artificial Sequence: Synthetic oligonucleotide
  Target: LAMA2; (+) strand; PAM type: YTN; PAM sequence: TTA
ttttatttcatttcttacta

SEQ ID NO: 409009 - DNA, 20 bp, Artificial Sequence
  Description of Artificial Sequence: Synthetic oligonucleotide
  Target: LAMA2; (+) strand; PAM type: YTN; PAM sequence: TTT
tatttcatttcttactacac

SEQ ID NO: 409010 - DNA, 20 bp, Artificial Sequence
  Description of Artificial Sequence: Synthetic oligonucleotide
  Target: LAMA2; (+) strand; PAM type: YTN; PAM sequence: TTT
atttcatttcttactacaca

SEQ ID NO: 409011 - DNA, 20 bp, Artificial Sequence
  Description of Artificial Sequence: Synthetic oligonucleotide
  Target: LAMA2; (+) strand; PAM type: YTN; PAM sequence: TTA
tttcatttcttactacacat

SEQ ID NO: 409012 - DNA, 20 bp, Artificial Sequence
  Description of Artificial Sequence: Synthetic oligonucleotide
  Target: LAMA2; (+) strand; PAM type: YTN; PAM sequence: TTT
catttcttactacacataat

SEQ ID NO: 409013 - DNA, 20 bp, Artificial Sequence
  Description of Artificial Sequence: Synthetic oligonucleotide
  Target: LAMA2; (+) strand; PAM type: YTN; PAM sequence: TTC
atttcttactacacataata

SEQ ID NO: 409014 - DNA, 20 bp, Artificial Sequence
  Description of Artificial Sequence: Synthetic oligonucleotide
  Target: LAMA2; (+) strand; PAM type: YTN; PAM sequence: TTT
cttactacacataataagca

SEQ ID NO: 409015 - DNA, 20 bp, Artificial Sequence
  Description of Artificial Sequence: Synthetic oligonucleotide
  Target: LAMA2; (+) strand; PAM type: YTN; PAM sequence: TTC
ttactacacataataagcac

SEQ ID NO: 409016 - DNA, 20 bp, Artificial Sequence
  Description of Artificial Sequence: Synthetic oligonucleotide
  Target: LAMA2; (+) strand; PAM type: YTN; PAM sequence: CTT
actacacataataagcacta

SEQ ID NO: 409017 - DNA, 20 bp, Artificial Sequence
  Description of Artificial Sequence: Synthetic oligonucleotide
  Target: LAMA2; (+) strand; PAM type: YTN; PAM sequence: TTA
ctacacataataagcactaa

SEQ ID NO: 409018 - DNA, 20 bp, Artificial Sequence
  Description of Artificial Sequence: Synthetic oligonucleotide
  Target: LAMA2; (+) strand; PAM type: YTN; PAM sequence: CTA
cacataataagcactaaata

SEQ ID NO: 409019 - DNA, 20 bp, Artificial Sequence
  Description of Artificial Sequence: Synthetic oligonucleotide
  Target: LAMA2; (+) strand; PAM type: YTN; PAM sequence: CTA
aataaatataaaatacaaat

SEQ ID NO: 409020 - DNA, 20 bp, Artificial Sequence
  Description of Artificial Sequence: Synthetic oligonucleotide
  Target: LAMA2; (+) strand; PAM type: YTN; PAM sequence: CTC
gtcaatttttttgtttatct

SEQ ID NO: 409021 - DNA, 20 bp, Artificial Sequence
  Description of Artificial Sequence: Synthetic oligonucleotide
  Target: LAMA2; (+) strand; PAM type: YTN; PAM sequence: TTT
ttttgtttatcttgaaaaat

SEQ ID NO: 409022 - DNA, 20 bp, Artificial Sequence
  Description of Artificial Sequence: Synthetic oligonucleotide
  Target: LAMA2; (+) strand; PAM type: YTN; PAM sequence: TTT
tttgtttatcttgaaaaata

SEQ ID NO: 409023 - DNA, 20 bp, Artificial Sequence
  Description of Artificial Sequence: Synthetic oligonucleotide
  Target: LAMA2; (+) strand; PAM type: YTN; PAM sequence: TTT
ttgtttatcttgaaaaataa

SEQ ID NO: 409024 - DNA, 20 bp, Artificial Sequence
  Description of Artificial Sequence: Synthetic oligonucleotide
  Target: LAMA2; (+) strand; PAM type: YTN; PAM sequence: TTT
tgtttatcttgaaaaataaa

SEQ ID NO: 409025 - DNA, 20 bp, Artificial Sequence
  Description of Artificial Sequence: Synthetic oligonucleotide
  Target: LAMA2; (+) strand; PAM type: YTN; PAM sequence: TTT
gtttatcttgaaaaataaac

SEQ ID NO: 409026 - DNA, 20 bp, Artificial Sequence
  Description of Artificial Sequence: Synthetic oligonucleotide
  Target: LAMA2; (+) strand; PAM type: YTN; PAM sequence: TTG
tttatcttgaaaaataaact

SEQ ID NO: 409027 - DNA, 20 bp, Artificial Sequence
  Description of Artificial Sequence: Synthetic oligonucleotide
  Target: LAMA2; (+) strand; PAM type: YTN; PAM sequence: TTT
atcttgaaaaataaactttt

SEQ ID NO: 409028 - DNA, 20 bp, Artificial Sequence
  Description of Artificial Sequence: Synthetic oligonucleotide
  Target: LAMA2; (+) strand; PAM type: YTN; PAM sequence: TTA
tcttgaaaaataaacttttt

SEQ ID NO: 409029 - DNA, 20 bp, Artificial Sequence
  Description of Artificial Sequence: Synthetic oligonucleotide
  Target: LAMA2; (+) strand; PAM type: YTN; PAM sequence: CTT
gaaaaataaacttttttctc

SEQ ID NO: 409030 - DNA, 20 bp, Artificial Sequence
  Description of Artificial Sequence: Synthetic oligonucleotide
  Target: LAMA2; (+) strand; PAM type: YTN; PAM sequence: TTG
aaaaataaacttttttctca

SEQ ID NO: 409031 - DNA, 20 bp, Artificial Sequence
  Description of Artificial Sequence: Synthetic oligonucleotide
  Target: LAMA2; (+) strand; PAM type: YTN; PAM sequence: CTT
ttttctcatattgcaaatga

SEQ ID NO: 409032 - DNA, 20 bp, Artificial Sequence
  Description of Artificial Sequence: Synthetic oligonucleotide
  Target: LAMA2; (+) strand; PAM type: YTN; PAM sequence: TTT
tttctcatattgcaaatgat

SEQ ID NO: 409033 - DNA, 20 bp, Artificial Sequence
  Description of Artificial Sequence: Synthetic oligonucleotide
  Target: LAMA2; (+) strand; PAM type: YTN; PAM sequence: TTT
ttctcatattgcaaatgata

SEQ ID NO: 409034 - DNA, 20 bp, Artificial Sequence
  Description of Artificial Sequence: Synthetic oligonucleotide
  Target: LAMA2; (+) strand; PAM type: YTN; PAM sequence: TTT
tctcatattgcaaatgataa

SEQ ID NO: 409035 - DNA, 20 bp, Artificial Sequence
  Description of Artificial Sequence: Synthetic oligonucleotide
  Target: LAMA2; (+) strand; PAM type: YTN; PAM sequence: TTT
ctcatattgcaaatgataag

SEQ ID NO: 409036 - DNA, 20 bp, Artificial Sequence
  Description of Artificial Sequence: Synthetic oligonucleotide
  Target: LAMA2; (+) strand; PAM type: YTN; PAM sequence: TTC
tcatattgcaaatgataagc

SEQ ID NO: 409037 - DNA, 20 bp, Artificial Sequence
  Description of Artificial Sequence: Synthetic oligonucleotide
  Target: LAMA2; (+) strand; PAM type: YTN; PAM sequence: CTC
atattgcaaatgataagcta

SEQ ID NO: 409038 - DNA, 20 bp, Artificial Sequence
  Description of Artificial Sequence: Synthetic oligonucleotide
  Target: LAMA2; (+) strand; PAM type: YTN; PAM sequence: TTG
caaatgataagctagttata

SEQ ID NO: 409039 - DNA, 20 bp, Artificial Sequence
  Description of Artificial Sequence: Synthetic oligonucleotide
  Target: LAMA2; (+) strand; PAM type: YTN; PAM sequence: CTA
gttataataagaataccaga

SEQ ID NO: 409040 - DNA, 20 bp, Artificial Sequence
  Description of Artificial Sequence: Synthetic oligonucleotide
  Target: LAMA2; (+) strand; PAM type: YTN; PAM sequence: TTA
taataagaataccagatcaa

SEQ ID NO: 409041 - DNA, 20 bp, Artificial Sequence
  Description of Artificial Sequence: Synthetic oligonucleotide
  Target: LAMA2; (+) strand; PAM type: YTN; PAM sequence: TTC
tgaaatagatttccactaaa

SEQ ID NO: 409042 - DNA, 20 bp, Artificial Sequence
  Description of Artificial Sequence: Synthetic oligonucleotide
  Target: LAMA2; (+) strand; PAM type: YTN; PAM sequence: CTG
aaatagatttccactaaagg

SEQ ID NO: 409043 - DNA, 20 bp, Artificial Sequence
  Description of Artificial Sequence: Synthetic oligonucleotide
  Target: LAMA2; (+) strand; PAM type: YTN; PAM sequence: TTT
ccactaaaggatacttgatt

SEQ ID NO: 409044 - DNA, 20 bp, Artificial Sequence
  Description of Artificial Sequence: Synthetic oligonucleotide
  Target: LAMA2; (+) strand; PAM type: YTN; PAM sequence: TTC
cactaaaggatacttgattc

SEQ ID NO: 409045 - DNA, 20 bp, Artificial Sequence
  Description of Artificial Sequence: Synthetic oligonucleotide
  Target: LAMA2; (+) strand; PAM type: YTN; PAM sequence: CTA
aaggatacttgattccttca

SEQ ID NO: 409046 - DNA, 20 bp, Artificial Sequence
  Description of Artificial Sequence: Synthetic oligonucleotide
  Target: LAMA2; (+) strand; PAM type: YTN; PAM sequence: CTT
gattccttcatcattgccag

SEQ ID NO: 409047 - DNA, 20 bp, Artificial Sequence
  Description of Artificial Sequence: Synthetic oligonucleotide
  Target: LAMA2; (+) strand; PAM type: YTN; PAM sequence: TTG
attccttcatcattgccaga

SEQ ID NO: 409048 - DNA, 20 bp, Artificial Sequence
  Description of Artificial Sequence: Synthetic oligonucleotide
  Target: LAMA2; (+) strand; PAM type: YTN; PAM sequence: TTC
cttcatcattgccagatatt

SEQ ID NO: 409049 - DNA, 20 bp, Artificial Sequence
  Description of Artificial Sequence: Synthetic oligonucleotide
  Target: LAMA2; (+) strand; PAM type: YTN; PAM sequence: CTT
catcattgccagatatttaa

SEQ ID NO: 409050 - DNA, 20 bp, Artificial Sequence
  Description of Artificial Sequence: Synthetic oligonucleotide
  Target: LAMA2; (+) strand; PAM type: YTN; PAM sequence: TTC
atcattgccagatatttaaa

SEQ ID NO: 409051 - DNA, 20 bp, Artificial Sequence
  Description of Artificial Sequence: Synthetic oligonucleotide
  Target: LAMA2; (+) strand; PAM type: YTN; PAM sequence: TTG
ccagatatttaaacactacc

SEQ ID NO: 409052 - DNA, 20 bp, Artificial Sequence
  Description of Artificial Sequence: Synthetic oligonucleotide
  Target: LAMA2; (+) strand; PAM type: YTN; PAM sequence: TTT
aaacactacctactggctcc

SEQ ID NO: 409053 - DNA, 20 bp, Artificial Sequence
  Description of Artificial Sequence: Synthetic oligonucleotide
  Target: LAMA2; (+) strand; PAM type: YTN; PAM sequence: TTA
aacactacctactggctcca

SEQ ID NO: 409054 - DNA, 20 bp, Artificial Sequence
  Description of Artificial Sequence: Synthetic oligonucleotide
  Target: LAMA2; (+) strand; PAM type: YTN; PAM sequence: CTA
cctactggctccaaatttct

SEQ ID NO: 409055 - DNA, 20 bp, Artificial Sequence
  Description of Artificial Sequence: Synthetic oligonucleotide
  Target: LAMA2; (+) strand; PAM type: YTN; PAM sequence: CTA
ctggctccaaatttctcctc

SEQ ID NO: 409056 - DNA, 20 bp, Artificial Sequence
  Description of Artificial Sequence: Synthetic oligonucleotide
  Target: LAMA2; (+) strand; PAM type: YTN; PAM sequence: CTG
gctccaaatttctcctcttc

SEQ ID NO: 409057 - DNA, 20 bp, Artificial Sequence
  Description of Artificial Sequence: Synthetic oligonucleotide
  Target: LAMA2; (+) strand; PAM type: YTN; PAM sequence: CTC
caaatttctcctcttcaaga

SEQ ID NO: 409058 - DNA, 20 bp, Artificial Sequence
  Description of Artificial Sequence: Synthetic oligonucleotide
  Target: LAMA2; (+) strand; PAM type: YTN; PAM sequence: TTT
ctcctcttcaagataaaaga

SEQ ID NO: 409059 - DNA, 20 bp, Artificial Sequence
  Description of Artificial Sequence: Synthetic oligonucleotide
  Target: LAMA2; (+) strand; PAM type: YTN; PAM sequence: TTC
tcctcttcaagataaaagaa

SEQ ID NO: 409060 - DNA, 20 bp, Artificial Sequence
  Description of Artificial Sequence: Synthetic oligonucleotide
  Target: LAMA2; (+) strand; PAM type: YTN; PAM sequence: CTC
ctcttcaagataaaagaaat

SEQ ID NO: 409061 - DNA, 20 bp, Artificial Sequence
  Description of Artificial Sequence: Synthetic oligonucleotide
  Target: LAMA2; (+) strand; PAM type: YTN; PAM sequence: CTC
ttcaagataaaagaaatgaa

SEQ ID NO: 409062 - DNA, 20 bp, Artificial Sequence
  Description of Artificial Sequence: Synthetic oligonucleotide
  Target: LAMA2; (+) strand; PAM type: YTN; PAM sequence: CTT
caagataaaagaaatgaatg

SEQ ID NO: 409063 - DNA, 20 bp, Artificial Sequence
  Description of Artificial Sequence: Synthetic oligonucleotide
  Target: LAMA2; (+) strand; PAM type: YTN; PAM sequence: TTC
aagataaaagaaatgaatgt

SEQ ID NO: 409064 - DNA, 20 bp, Artificial Sequence
  Description of Artificial Sequence: Synthetic oligonucleotide
  Target: LAMA2; (+) strand; PAM type: YTN; PAM sequence: CTT
tcaggatagtgcttaaaata

SEQ ID NO: 409065 - DNA, 20 bp, Artificial Sequence
  Description of Artificial Sequence: Synthetic oligonucleotide
  Target: LAMA2; (+) strand; PAM type: YTN; PAM sequence: TTT
caggatagtgcttaaaataa

SEQ ID NO: 409066 - DNA, 20 bp, Artificial Sequence
  Description of Artificial Sequence: Synthetic oligonucleotide
  Target: LAMA2; (+) strand; PAM type: YTN; PAM sequence: TTC
aggatagtgcttaaaataaa

SEQ ID NO: 409067 - DNA, 20 bp, Artificial Sequence
  Description of Artificial Sequence: Synthetic oligonucleotide
  Target: LAMA2; (+) strand; PAM type: YTN; PAM sequence: CTT
aaaataaaacagattcctat

SEQ ID NO: 409068 - DNA, 20 bp, Artificial Sequence
  Description of Artificial Sequence: Synthetic oligonucleotide
  Target: LAMA2; (+) strand; PAM type: YTN; PAM sequence: TTA
aaataaaacagattcctatt

SEQ ID NO: 409069 - DNA, 20 bp, Artificial Sequence
  Description of Artificial Sequence: Synthetic oligonucleotide
  Target: LAMA2; (+) strand; PAM type: YTN; PAM sequence: TTC
ctattaaaacaattacaata

SEQ ID NO: 409070 - DNA, 20 bp, Artificial Sequence
  Description of Artificial Sequence: Synthetic oligonucleotide
  Target: LAMA2; (+) strand; PAM type: YTN; PAM sequence: CTA
ttaaaacaattacaataaga

SEQ ID NO: 409071 - DNA, 20 bp, Artificial Sequence
  Description of Artificial Sequence: Synthetic oligonucleotide
  Target: LAMA2; (+) strand; PAM type: YTN; PAM sequence: TTA
aaacaattacaataagaaaa

SEQ ID NO: 409072 - DNA, 20 bp, Artificial Sequence
  Description of Artificial Sequence: Synthetic oligonucleotide
  Target: LAMA2; (+) strand; PAM type: YTN; PAM sequence: TTA
caataagaaaacactatgta

SEQ ID NO: 409073 - DNA, 20 bp, Artificial Sequence
  Description of Artificial Sequence: Synthetic oligonucleotide
  Target: LAMA2; (+) strand; PAM type: YTN; PAM sequence: CTA
tgtagtatagtataaagtaa

SEQ ID NO: 409074 - DNA, 20 bp, Artificial Sequence
  Description of Artificial Sequence: Synthetic oligonucleotide
  Target: LAMA2; (+) strand; PAM type: YTN; PAM sequence: TTA
aaatgacattttaatgtttt

SEQ ID NO: 409075 - DNA, 20 bp, Artificial Sequence
  Description of Artificial Sequence: Synthetic oligonucleotide
  Target: LAMA2; (+) strand; PAM type: YTN; PAM sequence: TTT
taatgttttaacattttaat

SEQ ID NO: 409076 - DNA, 20 bp, Artificial Sequence
  Description of Artificial Sequence: Synthetic oligonucleotide
  Target: LAMA2; (+) strand; PAM type: YTN; PAM sequence: TTT
aatgttttaacattttaata

SEQ ID NO: 409077 - DNA, 20 bp, Artificial Sequence
  Description of Artificial Sequence: Synthetic oligonucleotide
  Target: LAMA2; (+) strand; PAM type: YTN; PAM sequence: TTA
atgttttaacattttaataa

SEQ ID NO: 409078 - DNA, 20 bp, Artificial Sequence
  Description of Artificial Sequence: Synthetic oligonucleotide
  Target: LAMA2; (+) strand; PAM type: YTN; PAM sequence: TTT
taacattttaataactcata

SEQ ID NO: 409079 - DNA, 20 bp, Artificial Sequence
  Description of Artificial Sequence: Synthetic oligonucleotide
  Target: LAMA2; (+) strand; PAM type: YTN; PAM sequence: TTT
aacattttaataactcatat

SEQ ID NO: 409080 - DNA, 20 bp, Artificial Sequence
  Description of Artificial Sequence: Synthetic oligonucleotide
  Target: LAMA2; (+) strand; PAM type: YTN; PAM sequence: TTA
acattttaataactcatatc

SEQ ID NO: 409081 - DNA, 20 bp, Artificial Sequence
  Description of Artificial Sequence: Synthetic oligonucleotide
  Target: LAMA2; (+) strand; PAM type: YTN; PAM sequence: TTT
taataactcatatctacttt

SEQ ID NO: 409082 - DNA, 20 bp, Artificial Sequence
  Description of Artificial Sequence: Synthetic oligonucleotide
  Target: LAMA2; (+) strand; PAM type: YTN; PAM sequence: TTT
aataactcatatctacttta

SEQ ID NO: 409083 - DNA, 20 bp, Artificial Sequence
  Description of Artificial Sequence: Synthetic oligonucleotide
  Target: LAMA2; (+) strand; PAM type: YTN; PAM sequence: TTA
ataactcatatctactttat

SEQ ID NO: 409084 - DNA, 20 bp, Artificial Sequence
  Description of Artificial Sequence: Synthetic oligonucleotide
  Target: LAMA2; (+) strand; PAM type: YTN; PAM sequence: CTC
atatctactttataaaatat

SEQ ID NO: 409085 - DNA, 20 bp, Artificial Sequence
  Description of Artificial Sequence: Synthetic oligonucleotide
  Target: LAMA2; (+) strand; PAM type: YTN; PAM sequence: CTA
ctttataaaatatcatagta

SEQ ID NO: 409086 - DNA, 20 bp, Artificial Sequence
  Description of Artificial Sequence: Synthetic oligonucleotide
  Target: LAMA2; (+) strand; PAM type: YTN; PAM sequence: CTT
tataaaatatcatagtatat

SEQ ID NO: 409087 - DNA, 20 bp, Artificial Sequence
  Description of Artificial Sequence: Synthetic oligonucleotide
  Target: LAMA2; (+) strand; PAM type: YTN; PAM sequence: TTT
ataaaatatcatagtatatg

SEQ ID NO: 409088 - DNA, 20 bp, Artificial Sequence
  Description of Artificial Sequence: Synthetic oligonucleotide
  Target: LAMA2; (+) strand; PAM type: YTN; PAM sequence: TTA
taaaatatcatagtatatgc

SEQ ID NO: 409089 - DNA, 20 bp, Artificial Sequence
  Description of Artificial Sequence: Synthetic oligonucleotide
  Target: LAMA2; (+) strand; PAM type: YTN; PAM sequence: CTA
tctgaaggaggaaccaatgt

SEQ ID NO: 409090 - DNA, 20 bp, Artificial Sequence
  Description of Artificial Sequence: Synthetic oligonucleotide
  Target: LAMA2; (+) strand; PAM type: YTN; PAM sequence: CTG
aaggaggaaccaatgttaaa

SEQ ID NO: 409091 - DNA, 20 bp, Artificial Sequence
  Description of Artificial Sequence: Synthetic oligonucleotide
  Target: LAMA2; (+) strand; PAM type: YTN; PAM sequence: TTA
aatagtataagtctgttaga

SEQ ID NO: 409092 - DNA, 20 bp, Artificial Sequence
  Description of Artificial Sequence: Synthetic oligonucleotide
  Target: LAMA2; (+) strand; PAM type: YTN; PAM sequence: CTG
ttagacataattagatttag

SEQ ID NO: 409093 - DNA, 20 bp, Artificial Sequence
  Description of Artificial Sequence: Synthetic oligonucleotide
  Target: LAMA2; (+) strand; PAM type: YTN; PAM sequence: TTA
gacataattagatttagatt

SEQ ID NO: 409094 - DNA, 20 bp, Artificial Sequence
  Description of Artificial Sequence: Synthetic oligonucleotide
  Target: LAMA2; (+) strand; PAM type: YTN; PAM sequence: TTA
gatttagattcagtgctggt

SEQ ID NO: 409095 - DNA, 20 bp, Artificial Sequence
  Description of Artificial Sequence: Synthetic oligonucleotide
  Target: LAMA2; (+) strand; PAM type: YTN; PAM sequence: TTT
agattcagtgctggttaaat

SEQ ID NO: 409096 - DNA, 20 bp, Artificial Sequence
  Description of Artificial Sequence: Synthetic oligonucleotide
  Target: LAMA2; (+) strand; PAM type: YTN; PAM sequence: TTA
gattcagtgctggttaaatt

SEQ ID NO: 409097 - DNA, 20 bp, Artificial Sequence
  Description of Artificial Sequence: Synthetic oligonucleotide
  Target: LAMA2; (+) strand; PAM type: YTN; PAM sequence: TTC
agtgctggttaaattgacaa

SEQ ID NO: 409098 - DNA, 20 bp, Artificial Sequence
  Description of Artificial Sequence: Synthetic oligonucleotide
  Target: LAMA2; (+) strand; PAM type: YTN; PAM sequence: CTG
gttaaattgacaagttttat

SEQ ID NO: 409099 - DNA, 20 bp, Artificial Sequence
  Description of Artificial Sequence: Synthetic oligonucleotide
  Target: LAMA2; (+) strand; PAM type: YTN; PAM sequence: TTA
aattgacaagttttatattt

SEQ ID NO: 409100 - DNA, 20 bp, Artificial Sequence
  Description of Artificial Sequence: Synthetic oligonucleotide
  Target: LAMA2; (+) strand; PAM type: YTN; PAM sequence: TTG
acaagttttatatttcaaag

SEQ ID NO: 409101 - DNA, 20 bp, Artificial Sequence
  Description of Artificial Sequence: Synthetic oligonucleotide
  Target: LAMA2; (+) strand; PAM type: YTN; PAM sequence: TTT
tatatttcaaagctaacggt

SEQ ID NO: 409102 - DNA, 20 bp, Artificial Sequence
  Description of Artificial Sequence: Synthetic oligonucleotide
  Target: LAMA2; (+) strand; PAM type: YTN; PAM sequence: TTT
atatttcaaagctaacggtt

SEQ ID NO: 409103 - DNA, 20 bp, Artificial Sequence
  Description of Artificial Sequence: Synthetic oligonucleotide
  Target: LAMA2; (+) strand; PAM type: YTN; PAM sequence: TTA
tatttcaaagctaacggttt

SEQ ID NO: 409104 - DNA, 20 bp, Artificial Sequence
  Description of Artificial Sequence: Synthetic oligonucleotide
  Target: LAMA2; (+) strand; PAM type: YTN; PAM sequence: TTT
caaagctaacggttttgata

SEQ ID NO: 409105 - DNA, 20 bp, Artificial Sequence
  Description of Artificial Sequence: Synthetic oligonucleotide
  Target: LAMA2; (+) strand; PAM type: YTN; PAM sequence: TTC
aaagctaacggttttgatac

SEQ ID NO: 409106 - DNA, 20 bp, Artificial Sequence
  Description of Artificial Sequence: Synthetic oligonucleotide
  Target: LAMA2; (+) strand; PAM type: YTN; PAM sequence: CTA
acggttttgatacccataga

SEQ ID NO: 409107 - DNA, 20 bp, Artificial Sequence
  Description of Artificial Sequence: Synthetic oligonucleotide
  Target: LAMA2; (+) strand; PAM type: YTN; PAM sequence: TTT
tgatacccatagagttattt

SEQ ID NO: 409108 - DNA, 20 bp, Artificial Sequence
  Description of Artificial Sequence: Synthetic oligonucleotide
  Target: LAMA2; (+) strand; PAM type: YTN; PAM sequence: TTT
gatacccatagagttatttg

SEQ ID NO: 409109 - DNA, 20 bp, Artificial Sequence
  Description of Artificial Sequence: Synthetic oligonucleotide
  Target: LAMA2; (+) strand; PAM type: YTN; PAM sequence: TTG
atacccatagagttatttgt

SEQ ID NO: 409110 - DNA, 20 bp, Artificial Sequence
  Description of Artificial Sequence: Synthetic oligonucleotide
  Target: LAMA2; (+) strand; PAM type: YTN; PAM sequence: TTA
tttgtgattcctttctgcta

SEQ ID NO: 409111 - DNA, 20 bp, Artificial Sequence
  Description of Artificial Sequence: Synthetic oligonucleotide
  Target: LAMA2; (+) strand; PAM type: YTN; PAM sequence: TTT
gtgattcctttctgctaaat

SEQ ID NO: 409112 - DNA, 20 bp, Artificial Sequence
  Description of Artificial Sequence: Synthetic oligonucleotide
  Target: LAMA2; (+) strand; PAM type: YTN; PAM sequence: TTG
tgattcctttctgctaaatg

SEQ ID NO: 409113 - DNA, 20 bp, Artificial Sequence
  Description of Artificial Sequence: Synthetic oligonucleotide
  Target: LAMA2; (+) strand; PAM type: YTN; PAM sequence: TTC
ctttctgctaaatgggtttg

SEQ ID NO: 409114 - DNA, 20 bp, Artificial Sequence
  Description of Artificial Sequence: Synthetic oligonucleotide
  Target: LAMA2; (+) strand; PAM type: YTN; PAM sequence: CTT
tctgctaaatgggtttgata

SEQ ID NO: 409115 - DNA, 20 bp, Artificial Sequence
  Description of Artificial Sequence: Synthetic oligonucleotide
  Target: LAMA2; (+) strand; PAM type: YTN; PAM sequence: TTT
ctgctaaatgggtttgatat

SEQ ID NO: 409116 - DNA, 20 bp, Artificial Sequence
  Description of Artificial Sequence: Synthetic oligonucleotide
  Target: LAMA2; (+) strand; PAM type: YTN; PAM sequence: TTC
tgctaaatgggtttgatatg

SEQ ID NO: 409117 - DNA, 20 bp, Artificial Sequence
  Description of Artificial Sequence: Synthetic oligonucleotide
  Target: LAMA2; (+) strand; PAM type: YTN; PAM sequence: CTG
ctaaatgggtttgatatggc

SEQ ID NO: 409118 - DNA, 20 bp, Artificial Sequence
  Description of Artificial Sequence: Synthetic oligonucleotide
  Target: LAMA2; (+) strand; PAM type: YTN; PAM sequence: CTA
aatgggtttgatatggcaaa

SEQ ID NO: 409119 - DNA, 20 bp, Artificial Sequence
  Description of Artificial Sequence: Synthetic oligonucleotide
  Target: LAMA2; (+) strand; PAM type: YTN; PAM sequence: TTT
gatatggcaaaccatccatg

SEQ ID NO: 409120 - DNA, 20 bp, Artificial Sequence
  Description of Artificial Sequence: Synthetic oligonucleotide
  Target: LAMA2; (+) strand; PAM type: YTN; PAM sequence: TTG
atatggcaaaccatccatga

SEQ ID NO: 409121 - DNA, 20 bp, Artificial Sequence
  Description of Artificial Sequence: Synthetic oligonucleotide
  Target: LAMA2; (+) strand; PAM type: YTN; PAM sequence: CTA
aggaatttttaattgagtag

SEQ ID NO: 409122 - DNA, 20 bp, Artificial Sequence
  Description of Artificial Sequence: Synthetic oligonucleotide
  Target: LAMA2; (+) strand; PAM type: YTN; PAM sequence: TTT
ttaattgagtagtttgtgtt

SEQ ID NO: 409123 - DNA, 20 bp, Artificial Sequence
  Description of Artificial Sequence: Synthetic oligonucleotide
  Target: LAMA2; (+) strand; PAM type: YTN; PAM sequence: TTT
taattgagtagtttgtgttt

SEQ ID NO: 409124 - DNA, 20 bp, Artificial Sequence
  Description of Artificial Sequence: Synthetic oligonucleotide
  Target: LAMA2; (+) strand; PAM type: YTN; PAM sequence: TTT
aattgagtagtttgtgtttt

SEQ ID NO: 409125 - DNA, 20 bp, Artificial Sequence
  Description of Artificial Sequence: Synthetic oligonucleotide
  Target: LAMA2; (+) strand; PAM type: YTN; PAM sequence: TTA
attgagtagtttgtgttttc

SEQ ID NO: 409126 - DNA, 20 bp, Artificial Sequence
  Description of Artificial Sequence: Synthetic oligonucleotide
  Target: LAMA2; (+) strand; PAM type: YTN; PAM sequence: TTG
agtagtttgtgttttccctt

SEQ ID NO: 409127 - DNA, 20 bp, Artificial Sequence
  Description of Artificial Sequence: Synthetic oligonucleotide
  Target: LAMA2; (+) strand; PAM type: YTN; PAM sequence: TTT
gtgttttccctttgacagat

SEQ ID NO: 409128 - DNA, 20 bp, Artificial Sequence
  Description of Artificial Sequence: Synthetic oligonucleotide
  Target: LAMA2; (+) strand; PAM type: YTN; PAM sequence: TTG
tgttttccctttgacagatg

SEQ ID NO: 409129 - DNA, 20 bp, Artificial Sequence
  Description of Artificial Sequence: Synthetic oligonucleotide
  Target: LAMA2; (+) strand; PAM type: YTN; PAM sequence: TTT
tccctttgacagatggtgag

SEQ ID NO: 409130 - DNA, 20 bp, Artificial Sequence
  Description of Artificial Sequence: Synthetic oligonucleotide
  Target: LAMA2; (+) strand; PAM type: YTN; PAM sequence: TTT
ccctttgacagatggtgagc

SEQ ID NO: 409131 - DNA, 20 bp, Artificial Sequence
  Description of Artificial Sequence: Synthetic oligonucleotide
  Target: LAMA2; (+) strand; PAM type: YTN; PAM sequence: TTC
cctttgacagatggtgagca

SEQ ID NO: 409132 - DNA, 20 bp, Artificial Sequence
  Description of Artificial Sequence: Synthetic oligonucleotide
  Target: LAMA2; (+) strand; PAM type: YTN; PAM sequence: CTT
tgacagatggtgagcactta

SEQ ID NO: 409133 - DNA, 20 bp, Artificial Sequence
  Description of Artificial Sequence: Synthetic oligonucleotide
  Target: LAMA2; (+) strand; PAM type: YTN; PAM sequence: TTT
gacagatggtgagcacttat

SEQ ID NO: 409134 - DNA, 20 bp, Artificial Sequence
  Description of Artificial Sequence: Synthetic oligonucleotide
  Target: LAMA2; (+) strand; PAM type: YTN; PAM sequence: TTG
acagatggtgagcacttatc

SEQ ID NO: 409135 - DNA, 20 bp, Artificial Sequence
  Description of Artificial Sequence: Synthetic oligonucleotide
  Target: LAMA2; (+) strand; PAM type: YTN; PAM sequence: CTT
atccagatcctcaaaatgtt

SEQ ID NO: 409136 - DNA, 20 bp, Artificial Sequence
  Description of Artificial Sequence: Synthetic oligonucleotide
  Target: LAMA2; (+) strand; PAM type: YTN; PAM sequence: TTA
tccagatcctcaaaatgttc

SEQ ID NO: 409137 - DNA, 20 bp, Artificial Sequence
  Description of Artificial Sequence: Synthetic oligonucleotide
  Target: LAMA2; (+) strand; PAM type: YTN; PAM sequence: CTC
aaaatgttctgtggtggaca

SEQ ID NO: 409138 - DNA, 20 bp, Artificial Sequence
  Description of Artificial Sequence: Synthetic oligonucleotide
  Target: LAMA2; (+) strand; PAM type: YTN; PAM sequence: TTC
tgtggtggacacgtaactac

SEQ ID NO: 409139 - DNA, 20 bp, Artificial Sequence
  Description of Artificial Sequence: Synthetic oligonucleotide
  Target: LAMA2; (+) strand; PAM type: YTN; PAM sequence: CTG
tggtggacacgtaactacat

SEQ ID NO: 409140 - DNA, 20 bp, Artificial Sequence
  Description of Artificial Sequence: Synthetic oligonucleotide
  Target: LAMA2; (+) strand; PAM type: YTN; PAM sequence: CTA
catacatgatttagtaaatt

SEQ ID NO: 409141 - DNA, 20 bp, Artificial Sequence
  Description of Artificial Sequence: Synthetic oligonucleotide
  Target: LAMA2; (+) strand; PAM type: YTN; PAM sequence: TTT
agtaaattattggaacatga

SEQ ID NO: 409142 - DNA, 20 bp, Artificial Sequence
  Description of Artificial Sequence: Synthetic oligonucleotide
  Target: LAMA2; (+) strand; PAM type: YTN; PAM sequence: TTA
gtaaattattggaacatgat

SEQ ID NO: 409143 - DNA, 20 bp, Artificial Sequence
  Description of Artificial Sequence: Synthetic oligonucleotide
  Target: LAMA2; (+) strand; PAM type: YTN; PAM sequence: TTA
ttggaacatgatgatgtttg

SEQ ID NO: 409144 - DNA, 20 bp, Artificial Sequence
  Description of Artificial Sequence: Synthetic oligonucleotide
  Target: LAMA2; (+) strand; PAM type: YTN; PAM sequence: TTG
gaacatgatgatgtttgatg

SEQ ID NO: 409145 - DNA, 20 bp, Artificial Sequence
  Description of Artificial Sequence: Synthetic oligonucleotide
  Target: LAMA2; (+) strand; PAM type: YTN; PAM sequence: TTT
gatggaatctgtctctacca

SEQ ID NO: 409146 - DNA, 20 bp, Artificial Sequence
  Description of Artificial Sequence: Synthetic oligonucleotide
  Target: LAMA2; (+) strand; PAM type: YTN; PAM sequence: TTG
atggaatctgtctctaccac

SEQ ID NO: 409147 - DNA, 20 bp, Artificial Sequence
  Description of Artificial Sequence: Synthetic oligonucleotide
  Target: LAMA2; (+) strand; PAM type: YTN; PAM sequence: CTG
tctctaccaccatagatgac

SEQ ID NO: 409148 - DNA, 20 bp, Artificial Sequence
  Description of Artificial Sequence: Synthetic oligonucleotide
  Target: LAMA2; (+) strand; PAM type: YTN; PAM sequence: CTC
taccaccatagatgactcat

SEQ ID NO: 409149 - DNA, 20 bp, Artificial Sequence
  Description of Artificial Sequence: Synthetic oligonucleotide
  Target: LAMA2; (+) strand; PAM type: YTN; PAM sequence: CTA
ccaccatagatgactcatgg

SEQ ID NO: 409150 - DNA, 20 bp, Artificial Sequence
  Description of Artificial Sequence: Synthetic oligonucleotide
  Target: LAMA2; (+) strand; PAM type: YTN; PAM sequence: CTC
atggagaactgagccatcac

SEQ ID NO: 409151 - DNA, 20 bp, Artificial Sequence
  Description of Artificial Sequence: Synthetic oligonucleotide
  Target: LAMA2; (+) strand; PAM type: YTN; PAM sequence: CTG
agccatcactgtgtggcagg

SEQ ID NO: 409152 - DNA, 20 bp, Artificial Sequence
  Description of Artificial Sequence: Synthetic oligonucleotide
  Target: LAMA2; (+) strand; PAM type: YTN; PAM sequence: CTG
tgtggcaggtgcccccatac

SEQ ID NO: 409153 - DNA, 20 bp, Artificial Sequence
  Description of Artificial Sequence: Synthetic oligonucleotide
  Target: LAMA2; (+) strand; PAM type: YTN; PAM sequence: CTC
cacaagaaagggagagcacg

SEQ ID NO: 409154 - DNA, 20 bp, Artificial Sequence
  Description of Artificial Sequence: Synthetic oligonucleotide
  Target: LAMA2; (+) strand; PAM type: YTN; PAM sequence: CTC
tagggacaaggactgcattc

SEQ ID NO: 409155 - DNA, 20 bp, Artificial Sequence
  Description of Artificial Sequence: Synthetic oligonucleotide
  Target: LAMA2; (+) strand; PAM type: YTN; PAM sequence: CTA
gggacaaggactgcattcag

SEQ ID NO: 409156 - DNA, 20 bp, Artificial Sequence
  Description of Artificial Sequence: Synthetic oligonucleotide
  Target: LAMA2; (+) strand; PAM type: YTN; PAM sequence: CTG
cattcaggctccctggggtt

SEQ ID NO: 409157 - DNA, 20 bp, Artificial Sequence
  Description of Artificial Sequence: Synthetic oligonucleotide
  Target: LAMA2; (+) strand; PAM type: YTN; PAM sequence: TTC
aggctccctggggttcatga

SEQ ID NO: 409158 - DNA, 20 bp, Artificial Sequence
  Description of Artificial Sequence: Synthetic oligonucleotide
  Target: LAMA2; (+) strand; PAM type: YTN; PAM sequence: CTC
cctggggttcatgatgggat

SEQ ID NO: 409159 - DNA, 20 bp, Artificial Sequence
  Description of Artificial Sequence: Synthetic oligonucleotide
  Target: LAMA2; (+) strand; PAM type: YTN; PAM sequence: CTG
gggttcatgatgggatatca

SEQ ID NO: 409160 - DNA, 20 bp, Artificial Sequence
  Description of Artificial Sequence: Synthetic oligonucleotide
  Target: LAMA2; (+) strand; PAM type: YTN; PAM sequence: TTC
atgatgggatatcaaaacca

SEQ ID NO: 409161 - DNA, 20 bp, Artificial Sequence
  Description of Artificial Sequence: Synthetic oligonucleotide
  Target: LAMA2; (+) strand; PAM type: YTN; PAM sequence: CTG
gttgctatagtaacagtagc

SEQ ID NO: 409162 - DNA, 20 bp, Artificial Sequence
  Description of Artificial Sequence: Synthetic oligonucleotide
  Target: LAMA2; (+) strand; PAM type: YTN; PAM sequence: TTG
ctatagtaacagtagcaaga

SEQ ID NO: 409163 - DNA, 20 bp, Artificial Sequence
  Description of Artificial Sequence: Synthetic oligonucleotide
  Target: LAMA2; (+) strand; PAM type: YTN; PAM sequence: CTA
tagtaacagtagcaagaaga

SEQ ID NO: 409164 - DNA, 20 bp, Artificial Sequence
  Description of Artificial Sequence: Synthetic oligonucleotide
  Target: LAMA2; (+) strand; PAM type: YTN; PAM sequence: CTT
gtggatgaaaaattatcttc

SEQ ID NO: 409165 - DNA, 20 bp, Artificial Sequence
  Description of Artificial Sequence: Synthetic oligonucleotide
  Target: LAMA2; (+) strand; PAM type: YTN; PAM sequence: TTG
tggatgaaaaattatcttcc

SEQ ID NO: 409166 - DNA, 20 bp, Artificial Sequence
  Description of Artificial Sequence: Synthetic oligonucleotide
  Target: LAMA2; (+) strand; PAM type: YTN; PAM sequence: TTA
tcttccttctttctaaatgt

SEQ ID NO: 409167 - DNA, 20 bp, Artificial Sequence
  Description of Artificial Sequence: Synthetic oligonucleotide
  Target: LAMA2; (+) strand; PAM type: YTN; PAM sequence: CTT
ccttctttctaaatgtggga

SEQ ID NO: 409168 - DNA, 20 bp, Artificial Sequence
  Description of Artificial Sequence: Synthetic oligonucleotide
  Target: LAMA2; (+) strand; PAM type: YTN; PAM sequence: TTC
cttctttctaaatgtgggag

SEQ ID NO: 409169 - DNA, 20 bp, Artificial Sequence
  Description of Artificial Sequence: Synthetic oligonucleotide
  Target: LAMA2; (+) strand; PAM type: YTN; PAM sequence: CTT
ctttctaaatgtgggaggca

SEQ ID NO: 409170 - DNA, 20 bp, Artificial Sequence
  Description of Artificial Sequence: Synthetic oligonucleotide
  Target: LAMA2; (+) strand; PAM type: YTN; PAM sequence: TTC
tttctaaatgtgggaggcag

SEQ ID NO: 409171 - DNA, 20 bp, Artificial Sequence
  Description of Artificial Sequence: Synthetic oligonucleotide
  Target: LAMA2; (+) strand; PAM type: YTN; PAM sequence: CTT
tctaaatgtgggaggcaggt

SEQ ID NO: 409172 - DNA, 20 bp, Artificial Sequence
  Description of Artificial Sequence: Synthetic oligonucleotide
  Target: LAMA2; (+) strand; PAM type: YTN; PAM sequence: TTT
ctaaatgtgggaggcaggtt

SEQ ID NO: 409173 - DNA, 20 bp, Artificial Sequence
  Description of Artificial Sequence: Synthetic oligonucleotide
  Target: LAMA2; (+) strand; PAM type: YTN; PAM sequence: TTC
taaatgtgggaggcaggtta

SEQ ID NO: 409174 - DNA, 20 bp, Artificial Sequence
  Description of Artificial Sequence: Synthetic oligonucleotide
  Target: LAMA2; (+) strand; PAM type: YTN; PAM sequence: CTA
aatgtgggaggcaggttaca

SEQ ID NO: 409175 - DNA, 20 bp, Artificial Sequence
  Description of Artificial Sequence: Synthetic oligonucleotide
  Target: LAMA2; (+) strand; PAM type: YTN; PAM sequence: TTA
catgtttgtgatagcgatct

SEQ ID NO: 409176 - DNA, 20 bp, Artificial Sequence
  Description of Artificial Sequence: Synthetic oligonucleotide
  Target: LAMA2; (+) strand; PAM type: YTN; PAM sequence: TTT
gtgatagcgatctattctac

SEQ ID NO: 409177 - DNA, 20 bp, Artificial Sequence
  Description of Artificial Sequence: Synthetic oligonucleotide
  Target: LAMA2; (+) strand; PAM type: YTN; PAM sequence: TTG
tgatagcgatctattctacc

SEQ ID NO: 409178 - DNA, 20 bp, Artificial Sequence
  Description of Artificial Sequence: Synthetic oligonucleotide
  Target: LAMA2; (+) strand; PAM type: YTN; PAM sequence: CTA
ttctaccagctcagagaaca

SEQ ID NO: 409179 - DNA, 20 bp, Artificial Sequence
  Description of Artificial Sequence: Synthetic oligonucleotide
  Target: LAMA2; (+) strand; PAM type: YTN; PAM sequence: TTC
taccagctcagagaacaaat

SEQ ID NO: 409180 - DNA, 20 bp, Artificial Sequence
  Description of Artificial Sequence: Synthetic oligonucleotide
  Target: LAMA2; (+) strand; PAM type: YTN; PAM sequence: CTA
ccagctcagagaacaaattg

SEQ ID NO: 409181 - DNA, 20 bp, Artificial Sequence
  Description of Artificial Sequence: Synthetic oligonucleotide
  Target: LAMA2; (+) strand; PAM type: YTN; PAM sequence: CTC
agagaacaaattgaagtcta

SEQ ID NO: 409182 - DNA, 20 bp, Artificial Sequence
  Description of Artificial Sequence: Synthetic oligonucleotide
  Target: LAMA2; (+) strand; PAM type: YTN; PAM sequence: TTG
aagtctaaatactcagaatg

SEQ ID NO: 409183 - DNA, 20 bp, Artificial Sequence
  Description of Artificial Sequence: Synthetic oligonucleotide
  Target: LAMA2; (+) strand; PAM type: YTN; PAM sequence: CTA
aatactcagaatgccacaag

SEQ ID NO: 409184 - DNA, 20 bp, Artificial Sequence
  Description of Artificial Sequence: Synthetic oligonucleotide
  Target: LAMA2; (+) strand; PAM type: YTN; PAM sequence: CTC
agaatgccacaaggttggga

SEQ ID NO: 409185 - DNA, 20 bp, Artificial Sequence
  Description of Artificial Sequence: Synthetic oligonucleotide
  Target: LAMA2; (+) strand; PAM type: YTN; PAM sequence: TTG
ggagtcaggcctgattctca

SEQ ID NO: 409186 - DNA, 20 bp, Artificial Sequence
  Description of Artificial Sequence: Synthetic oligonucleotide
  Target: LAMA2; (+) strand; PAM type: YTN; PAM sequence: CTG
attctcagaagctagctgtc

SEQ ID NO: 409187 - DNA, 20 bp, Artificial Sequence
  Description of Artificial Sequence: Synthetic oligonucleotide
  Target: LAMA2; (+) strand; PAM type: YTN; PAM sequence: TTC
tcagaagctagctgtccact

SEQ ID NO: 409188 - DNA, 20 bp, Artificial Sequence
  Description of Artificial Sequence: Synthetic oligonucleotide
  Target: LAMA2; (+) strand; PAM type: YTN; PAM sequence: CTC
agaagctagctgtccacttg

SEQ ID NO: 409189 - DNA, 20 bp, Artificial Sequence
  Description of Artificial Sequence: Synthetic oligonucleotide
  Target: LAMA2; (+) strand; PAM type: YTN; PAM sequence: CTA
gctgtccacttgtgaatata

SEQ ID NO: 409190 - DNA, 20 bp, Artificial Sequence
  Description of Artificial Sequence: Synthetic oligonucleotide
  Target: LAMA2; (+) strand; PAM type: YTN; PAM sequence: CTG
tccacttgtgaatataaggg

SEQ ID NO: 409191 - DNA, 20 bp, Artificial Sequence
  Description of Artificial Sequence: Synthetic oligonucleotide
  Target: LAMA2; (+) strand; PAM type: YTN; PAM sequence: CTT
gtgaatataagggagaggga

SEQ ID NO: 409192 - DNA, 20 bp, Artificial Sequence
  Description of Artificial Sequence: Synthetic oligonucleotide
  Target: LAMA2; (+) strand; PAM type: YTN; PAM sequence: TTG
tgaatataagggagagggat

SEQ ID NO: 409193 - DNA, 20 bp, Artificial Sequence
  Description of Artificial Sequence: Synthetic oligonucleotide
  Target: LAMA2; (+) strand; PAM type: YTN; PAM sequence: TTT
tgttgacaccctttgtctcc

SEQ ID NO: 409194 - DNA, 20 bp, Artificial Sequence
  Description of Artificial Sequence: Synthetic oligonucleotide
  Target: LAMA2; (+) strand; PAM type: YTN; PAM sequence: TTT
gttgacaccctttgtctcct

SEQ ID NO: 409195 - DNA, 20 bp, Artificial Sequence
  Description of Artificial Sequence: Synthetic oligonucleotide
  Target: LAMA2; (+) strand; PAM type: YTN; PAM sequence: TTG
ttgacaccctttgtctcctg

SEQ ID NO: 409196 - DNA, 20 bp, Artificial Sequence
  Description of Artificial Sequence: Synthetic oligonucleotide
  Target: LAMA2; (+) strand; PAM type: YTN; PAM sequence: TTG
acaccctttgtctcctgatg

SEQ ID NO: 409197 - DNA, 20 bp, Artificial Sequence
  Description of Artificial Sequence: Synthetic oligonucleotide
  Target: LAMA2; (+) strand; PAM type: YTN; PAM sequence: CTT
tgtctcctgatgggttttat

SEQ ID NO: 409198 - DNA, 20 bp, Artificial Sequence
  Description of Artificial Sequence: Synthetic oligonucleotide
  Target: LAMA2; (+) strand; PAM type: YTN; PAM sequence: TTT
gtctcctgatgggttttata

SEQ ID NO: 409199 - DNA, 20 bp, Artificial Sequence
  Description of Artificial Sequence: Synthetic oligonucleotide
  Target: LAMA2; (+) strand; PAM type: YTN; PAM sequence: TTG
tctcctgatgggttttataa

SEQ ID NO: 409200 - DNA, 20 bp, Artificial Sequence
  Description of Artificial Sequence: Synthetic oligonucleotide
  Target: LAMA2; (+) strand; PAM type: YTN; PAM sequence: CTC
ctgatgggttttataagtta

SEQ ID NO: 409201 - DNA, 20 bp, Artificial Sequence
  Description of Artificial Sequence: Synthetic oligonucleotide
  Target: LAMA2; (+) strand; PAM type: YTN; PAM sequence: CTG
atgggttttataagttagag

SEQ ID NO: 409202 - DNA, 20 bp, Artificial Sequence
  Description of Artificial Sequence: Synthetic oligonucleotide
  Target: LAMA2; (+) strand; PAM type: YTN; PAM sequence: TTT
tataagttagaggaccaacg

SEQ ID NO: 409203 - DNA, 20 bp, Artificial Sequence
  Description of Artificial Sequence: Synthetic oligonucleotide
  Target: LAMA2; (+) strand; PAM type: YTN; PAM sequence: TTT
ataagttagaggaccaacgc

SEQ ID NO: 409204 - DNA, 20 bp, Artificial Sequence
  Description of Artificial Sequence: Synthetic oligonucleotide
  Target: LAMA2; (+) strand; PAM type: YTN; PAM sequence: TTA
taagttagaggaccaacgca

SEQ ID NO: 409205 - DNA, 20 bp, Artificial Sequence
  Description of Artificial Sequence: Synthetic oligonucleotide
  Target: LAMA2; (+) strand; PAM type: YTN; PAM sequence: TTA
gaggaccaacgcaagcacag

SEQ ID NO: 409206 - DNA, 20 bp, Artificial Sequence
  Description of Artificial Sequence: Synthetic oligonucleotide
  Target: LAMA2; (+) strand; PAM type: YTN; PAM sequence: CTG
ttactttcagcatcacaaat

SEQ ID NO: 409207 - DNA, 20 bp, Artificial Sequence
  Description of Artificial Sequence: Synthetic oligonucleotide
  Target: LAMA2; (+) strand; PAM type: YTN; PAM sequence: TTA
ctttcagcatcacaaatctg

SEQ ID NO: 409208 - DNA, 20 bp, Artificial Sequence
  Description of Artificial Sequence: Synthetic oligonucleotide
  Target: LAMA2; (+) strand; PAM type: YTN; PAM sequence: CTT
tcagcatcacaaatctgctt

SEQ ID NO: 409209 - DNA, 20 bp, Artificial Sequence
  Description of Artificial Sequence: Synthetic oligonucleotide
  Target: LAMA2; (+) strand; PAM type: YTN; PAM sequence: TTT
cagcatcacaaatctgcttt

SEQ ID NO: 409210 - DNA, 20 bp, Artificial Sequence
  Description of Artificial Sequence: Synthetic oligonucleotide
  Target: LAMA2; (+) strand; PAM type: YTN; PAM sequence: TTC
agcatcacaaatctgctttg

SEQ ID NO: 409211 - DNA, 20 bp, Artificial Sequence
  Description of Artificial Sequence: Synthetic oligonucleotide
  Target: LAMA2; (+) strand; PAM type: YTN; PAM sequence: CTG
ctttgcagagaactgctata

SEQ ID NO: 409212 - DNA, 20 bp, Artificial Sequence
  Description of Artificial Sequence: Synthetic oligonucleotide
  Target: LAMA2; (+) strand; PAM type: YTN; PAM sequence: CTT
tgcagagaactgctatatta

SEQ ID NO: 409213 - DNA, 20 bp, Artificial Sequence
  Description of Artificial Sequence: Synthetic oligonucleotide
  Target: LAMA2; (+) strand; PAM type: YTN; PAM sequence: TTT
gcagagaactgctatattaa

SEQ ID NO: 409214 - DNA, 20 bp, Artificial Sequence
  Description of Artificial Sequence: Synthetic oligonucleotide
  Target: LAMA2; (+) strand; PAM type: YTN; PAM sequence: TTG
cagagaactgctatattaat

SEQ ID NO: 409215 - DNA, 20 bp, Artificial Sequence
  Description of Artificial Sequence: Synthetic oligonucleotide
  Target: LAMA2; (+) strand; PAM type: YTN; PAM sequence: CTG
ctatattaatatatccactt

SEQ ID NO: 409216 - DNA, 20 bp, Artificial Sequence
  Description of Artificial Sequence: Synthetic oligonucleotide
  Target: LAMA2; (+) strand; PAM type: YTN; PAM sequence: CTA
tattaatatatccactttcc

SEQ ID NO: 409217 - DNA, 20 bp, Artificial Sequence
  Description of Artificial Sequence: Synthetic oligonucleotide
  Target: LAMA2; (+) strand; PAM type: YTN; PAM sequence: TTA
atatatccactttccagatc

SEQ ID NO: 409218 - DNA, 20 bp, Artificial Sequence
  Description of Artificial Sequence: Synthetic oligonucleotide
  Target: LAMA2; (+) strand; PAM type: YTN; PAM sequence: CTT
tccagatcatctcacaagca

SEQ ID NO: 409219 - DNA, 20 bp, Artificial Sequence
  Description of Artificial Sequence: Synthetic oligonucleotide
  Target: LAMA2; (+) strand; PAM type: YTN; PAM sequence: TTT
ccagatcatctcacaagcaa

SEQ ID NO: 409220 - DNA, 20 bp, Artificial Sequence
  Description of Artificial Sequence: Synthetic oligonucleotide
  Target: LAMA2; (+) strand; PAM type: YTN; PAM sequence: TTC
cagatcatctcacaagcaaa

SEQ ID NO: 409221 - DNA, 20 bp, Artificial Sequence
  Description of Artificial Sequence: Synthetic oligonucleotide
  Target: LAMA2; (+) strand; PAM type: YTN; PAM sequence: CTC
acaagcaaaaatggtaaatg

SEQ ID NO: 409222 - DNA, 20 bp, Artificial Sequence
  Description of Artificial Sequence: Synthetic oligonucleotide
  Target: LAMA2; (+) strand; PAM type: YTN; PAM sequence: TTA
gaaagatatttccagctgtt

SEQ ID NO: 409223 - DNA, 20 bp, Artificial Sequence
  Description of Artificial Sequence: Synthetic oligonucleotide
  Target: LAMA2; (+) strand; PAM type: YTN; PAM sequence: TTT
ccagctgttttcaaaaccgt

SEQ ID NO: 409224 - DNA, 20 bp, Artificial Sequence
  Description of Artificial Sequence: Synthetic oligonucleotide
  Target: LAMA2; (+) strand; PAM type: YTN; PAM sequence: TTC
cagctgttttcaaaaccgtt

SEQ ID NO: 409225 - DNA, 20 bp, Artificial Sequence
  Description of Artificial Sequence: Synthetic oligonucleotide
  Target: LAMA2; (+) strand; PAM type: YTN; PAM sequence: CTG
ttttcaaaaccgtttgagaa

SEQ ID NO: 409226 - DNA, 20 bp, Artificial Sequence
  Description of Artificial Sequence: Synthetic oligonucleotide
  Target: LAMA2; (+) strand; PAM type: YTN; PAM sequence: TTT
tcaaaaccgtttgagaaaat

SEQ ID NO: 409227 - DNA, 20 bp, Artificial Sequence
  Description of Artificial Sequence: Synthetic oligonucleotide
  Target: LAMA2; (+) strand; PAM type: YTN; PAM sequence: TTT
caaaaccgtttgagaaaata

SEQ ID NO: 409228 - DNA, 20 bp, Artificial Sequence
  Description of Artificial Sequence: Synthetic oligonucleotide
  Target: LAMA2; (+) strand; PAM type: YTN; PAM sequence: TTC
aaaaccgtttgagaaaataa

SEQ ID NO: 409229 - DNA, 20 bp, Artificial Sequence
  Description of Artificial Sequence: Synthetic oligonucleotide
  Target: LAMA2; (+) strand; PAM type: YTN; PAM sequence: TTT
gagaaaataaagtcttaatt

SEQ ID NO: 409230 - DNA, 20 bp, Artificial Sequence
  Description of Artificial Sequence: Synthetic oligonucleotide
  Target: LAMA2; (+) strand; PAM type: YTN; PAM sequence: TTG
agaaaataaagtcttaattt

SEQ ID NO: 409231 - DNA, 20 bp, Artificial Sequence
  Description of Artificial Sequence: Synthetic oligonucleotide
  Target: LAMA2; (+) strand; PAM type: YTN; PAM sequence: CTT
aatttctcaggtaagatctc

SEQ ID NO: 409232 - DNA, 20 bp, Artificial Sequence
  Description of Artificial Sequence: Synthetic oligonucleotide
  Target: LAMA2; (+) strand; PAM type: YTN; PAM sequence: TTA
atttctcaggtaagatctca

SEQ ID NO: 409233 - DNA, 20 bp, Artificial Sequence
  Description of Artificial Sequence: Synthetic oligonucleotide
  Target: LAMA2; (+) strand; PAM type: YTN; PAM sequence: TTT
ctcaggtaagatctcagagc

SEQ ID NO: 409234 - DNA, 20 bp, Artificial Sequence
  Description of Artificial Sequence: Synthetic oligonucleotide
  Target: LAMA2; (+) strand; PAM type: YTN; PAM sequence: TTC
tcaggtaagatctcagagca

SEQ ID NO: 409235 - DNA, 20 bp, Artificial Sequence
  Description of Artificial Sequence: Synthetic oligonucleotide
  Target: LAMA2; (+) strand; PAM type: YTN; PAM sequence: CTC
aggtaagatctcagagcaga

SEQ ID NO: 409236 - DNA, 20 bp, Artificial Sequence
  Description of Artificial Sequence: Synthetic oligonucleotide
  Target: LAMA2; (+) strand; PAM type: YTN; PAM sequence: CTC
agagcagacgaacctgtggt

SEQ ID NO: 409237 - DNA, 20 bp, Artificial Sequence
  Description of Artificial Sequence: Synthetic oligonucleotide
  Target: LAMA2; (+) strand; PAM type: YTN; PAM sequence: CTG
tggttctgccagggaatctc

SEQ ID NO: 409238 - DNA, 20 bp, Artificial Sequence
  Description of Artificial Sequence: Synthetic oligonucleotide
  Target: LAMA2; (+) strand; PAM type: YTN; PAM sequence: TTC
tgccagggaatctctaaagc

SEQ ID NO: 409239 - DNA, 20 bp, Artificial Sequence
  Description of Artificial Sequence: Synthetic oligonucleotide
  Target: LAMA2; (+) strand; PAM type: YTN; PAM sequence: CTG
ccagggaatctctaaagcta

SEQ ID NO: 409240 - DNA, 20 bp, Artificial Sequence
  Description of Artificial Sequence: Synthetic oligonucleotide
  Target: LAMA2; (+) strand; PAM type: YTN; PAM sequence: CTC
taaagctaagccataaatga

SEQ ID NO: 409241 - DNA, 20 bp, Artificial Sequence
  Description of Artificial Sequence: Synthetic oligonucleotide
  Target: LAMA2; (+) strand; PAM type: YTN; PAM sequence: CTA
aagctaagccataaatgaga

SEQ ID NO: 409242 - DNA, 20 bp, Artificial Sequence
  Description of Artificial Sequence: Synthetic oligonucleotide
  Target: LAMA2; (+) strand; PAM type: YTN; PAM sequence: CTA
agccataaatgagacttctg

SEQ ID NO: 409243 - DNA, 20 bp, Artificial Sequence
  Description of Artificial Sequence: Synthetic oligonucleotide
  Target: LAMA2; (+) strand; PAM type: YTN; PAM sequence: CTT
ctgtttaatcttcaataacc

SEQ ID NO: 409244 - DNA, 20 bp, Artificial Sequence
  Description of Artificial Sequence: Synthetic oligonucleotide
  Target: LAMA2; (+) strand; PAM type: YTN; PAM sequence: TTC
tgtttaatcttcaataacca

SEQ ID NO: 409245 - DNA, 20 bp, Artificial Sequence
  Description of Artificial Sequence: Synthetic oligonucleotide
  Target: LAMA2; (+) strand; PAM type: YTN; PAM sequence: CTG
tttaatcttcaataaccact

SEQ ID NO: 409246 - DNA, 20 bp, Artificial Sequence
  Description of Artificial Sequence: Synthetic oligonucleotide
  Target: LAMA2; (+) strand; PAM type: YTN; PAM sequence: TTT
aatcttcaataaccacttgc

SEQ ID NO: 409247 - DNA, 20 bp, Artificial Sequence
  Description of Artificial Sequence: Synthetic oligonucleotide
  Target: LAMA2; (+) strand; PAM type: YTN; PAM sequence: TTA
atcttcaataaccacttgct

SEQ ID NO: 409248 - DNA, 20 bp, Artificial Sequence
  Description of Artificial Sequence: Synthetic oligonucleotide
  Target: LAMA2; (+) strand; PAM type: YTN; PAM sequence: CTT
caataaccacttgctgttgc

SEQ ID NO: 409249 - DNA, 20 bp, Artificial Sequence
  Description of Artificial Sequence: Synthetic oligonucleotide
  Target: LAMA2; (+) strand; PAM type: YTN; PAM sequence: TTC
aataaccacttgctgttgca

SEQ ID NO: 409250 - DNA, 20 bp, Artificial Sequence
  Description of Artificial Sequence: Synthetic oligonucleotide
  Target: LAMA2; (+) strand; PAM type: YTN; PAM sequence: CTT
gctgttgcaggcctattatg

SEQ ID NO: 409251 - DNA, 20 bp, Artificial Sequence
  Description of Artificial Sequence: Synthetic oligonucleotide
  Target: LAMA2; (+) strand; PAM type: YTN; PAM sequence: TTG
ctgttgcaggcctattatgc

SEQ ID NO: 409252 - DNA, 20 bp, Artificial Sequence
  Description of Artificial Sequence: Synthetic oligonucleotide
  Target: LAMA2; (+) strand; PAM type: YTN; PAM sequence: CTG
ttgcaggcctattatgcaat

SEQ ID NO: 409253 - DNA, 20 bp, Artificial Sequence
  Description of Artificial Sequence: Synthetic oligonucleotide
  Target: LAMA2; (+) strand; PAM type: YTN; PAM sequence: TTG
caggcctattatgcaatact

SEQ ID NO: 409254 - DNA, 20 bp, Artificial Sequence
  Description of Artificial Sequence: Synthetic oligonucleotide
  Target: LAMA2; (+) strand; PAM type: YTN; PAM sequence: CTA
ttatgcaatactcctcaaca

SEQ ID NO: 409255 - DNA, 20 bp, Artificial Sequence
  Description of Artificial Sequence: Synthetic oligonucleotide
  Target: LAMA2; (+) strand; PAM type: YTN; PAM sequence: TTA
tgcaatactcctcaacaggg

SEQ ID NO: 409256 - DNA, 20 bp, Artificial Sequence
  Description of Artificial Sequence: Synthetic oligonucleotide
  Target: LAMA2; (+) strand; PAM type: YTN; PAM sequence: CTC
ctcaacaggggccgtctgga

SEQ ID NO: 409257 - DNA, 20 bp, Artificial Sequence
  Description of Artificial Sequence: Synthetic oligonucleotide
  Target: LAMA2; (+) strand; PAM type: YTN; PAM sequence: CTC
aacaggggccgtctggaagt

SEQ ID NO: 409258 - DNA, 20 bp, Artificial Sequence
  Description of Artificial Sequence: Synthetic oligonucleotide
  Target: LAMA2; (+) strand; PAM type: YTN; PAM sequence: CTG
gaagtgcatctctccacagg

SEQ ID NO: 409259 - DNA, 20 bp, Artificial Sequence
  Description of Artificial Sequence: Synthetic oligonucleotide
  Target: LAMA2; (+) strand; PAM type: YTN; PAM sequence: CTC
tccacaggggcacgaacaat

SEQ ID NO: 409260 - DNA, 20 bp, Artificial Sequence
  Description of Artificial Sequence: Synthetic oligonucleotide
  Target: LAMA2; (+) strand; PAM type: YTN; PAM sequence: CTC
cacaggggcacgaacaatga

SEQ ID NO: 409261 - DNA, 20 bp, Artificial Sequence
  Description of Artificial Sequence: Synthetic oligonucleotide
  Target: LAMA2; (+) strand; PAM type: YTN; PAM sequence: TTG
tgatcagaccagagccgaat

SEQ ID NO: 409262 - DNA, 20 bp, Artificial Sequence
  Description of Artificial Sequence: Synthetic oligonucleotide
  Target: LAMA2; (+) strand; PAM type: YTN; PAM sequence: CTG
tttcatgatggaagagaaca

SEQ ID NO: 409263 - DNA, 20 bp, Artificial Sequence
  Description of Artificial Sequence: Synthetic oligonucleotide
  Target: LAMA2; (+) strand; PAM type: YTN; PAM sequence: TTT
catgatggaagagaacattc

SEQ ID NO: 409264 - DNA, 20 bp, Artificial Sequence
  Description of Artificial Sequence: Synthetic oligonucleotide
  Target: LAMA2; (+) strand; PAM type: YTN; PAM sequence: TTC
atgatggaagagaacattcc

SEQ ID NO: 409265 - DNA, 20 bp, Artificial Sequence
  Description of Artificial Sequence: Synthetic oligonucleotide
  Target: LAMA2; (+) strand; PAM type: YTN; PAM sequence: TTC
cgttcatgtagagcgaacta

SEQ ID NO: 409266 - DNA, 20 bp, Artificial Sequence
  Description of Artificial Sequence: Synthetic oligonucleotide
  Target: LAMA2; (+) strand; PAM type: YTN; PAM sequence: TTC
atgtagagcgaactagaggg

SEQ ID NO: 409267 - DNA, 20 bp, Artificial Sequence
  Description of Artificial Sequence: Synthetic oligonucleotide
  Target: LAMA2; (+) strand; PAM type: YTN; PAM sequence: CTA
gagggtaacaatagcactaa

SEQ ID NO: 409268 - DNA, 20 bp, Artificial Sequence
  Description of Artificial Sequence: Synthetic oligonucleotide
  Target: LAMA2; (+) strand; PAM type: YTN; PAM sequence: CTA
aaatatttattattgtaact

SEQ ID NO: 409269 - DNA, 20 bp, Artificial Sequence
  Description of Artificial Sequence: Synthetic oligonucleotide
  Target: LAMA2; (+) strand; PAM type: YTN; PAM sequence: TTT
attattgtaactcaggtgaa

SEQ ID NO: 409270 - DNA, 20 bp, Artificial Sequence
  Description of Artificial Sequence: Synthetic oligonucleotide
  Target: LAMA2; (+) strand; PAM type: YTN; PAM sequence: TTA
ttattgtaactcaggtgaac

SEQ ID NO: 409271 - DNA, 20 bp, Artificial Sequence
  Description of Artificial Sequence: Synthetic oligonucleotide
  Target: LAMA2; (+) strand; PAM type: YTN; PAM sequence: TTA
ttgtaactcaggtgaacttc

SEQ ID NO: 409272 - DNA, 20 bp, Artificial Sequence
  Description of Artificial Sequence: Synthetic oligonucleotide
  Target: LAMA2; (+) strand; PAM type: YTN; PAM sequence: TTG
taactcaggtgaacttcctt

SEQ ID NO: 409273 - DNA, 20 bp, Artificial Sequence
  Description of Artificial Sequence: Synthetic oligonucleotide
  Target: LAMA2; (+) strand; PAM type: YTN; PAM sequence: CTC
aggtgaacttcctttgctag

SEQ ID NO: 409274 - DNA, 20 bp, Artificial Sequence
  Description of Artificial Sequence: Synthetic oligonucleotide
  Target: LAMA2; (+) strand; PAM type: YTN; PAM sequence: CTT
cctttgctagcatcggtatc

SEQ ID NO: 409275 - DNA, 20 bp, Artificial Sequence
  Description of Artificial Sequence: Synthetic oligonucleotide
  Target: LAMA2; (+) strand; PAM type: YTN; PAM sequence: TTC
ctttgctagcatcggtatct

SEQ ID NO: 409276 - DNA, 20 bp, Artificial Sequence
  Description of Artificial Sequence: Synthetic oligonucleotide
  Target: LAMA2; (+) strand; PAM type: YTN; PAM sequence: CTT
tgctagcatcggtatctatc

SEQ ID NO: 409277 - DNA, 20 bp, Artificial Sequence
  Description of Artificial Sequence: Synthetic oligonucleotide
  Target: LAMA2; (+) strand; PAM type: YTN; PAM sequence: TTT
gctagcatcggtatctatca

SEQ ID NO: 409278 - DNA, 20 bp, Artificial Sequence
  Description of Artificial Sequence: Synthetic oligonucleotide
  Target: LAMA2; (+) strand; PAM type: YTN; PAM sequence: TTG
ctagcatcggtatctatcag

SEQ ID NO: 409279 - DNA, 20 bp, Artificial Sequence
  Description of Artificial Sequence: Synthetic oligonucleotide
  Target: LAMA2; (+) strand; PAM type: YTN; PAM sequence: CTA
gcatcggtatctatcagtat

SEQ ID NO: 409280 - DNA, 20 bp, Artificial Sequence
  Description of Artificial Sequence: Synthetic oligonucleotide
  Target: LAMA2; (+) strand; PAM type: YTN; PAM sequence: CTA
tcagtatctgcctgaacctc

SEQ ID NO: 409281 - DNA, 20 bp, Artificial Sequence
  Description of Artificial Sequence: Synthetic oligonucleotide
  Target: LAMA2; (+) strand; PAM type: YTN; PAM sequence: CTG
cctgaacctctgtgtgtgtg

SEQ ID NO: 409282 - DNA, 20 bp, Artificial Sequence
  Description of Artificial Sequence: Synthetic oligonucleotide
  Target: LAMA2; (+) strand; PAM type: YTN; PAM sequence: CTG
aacctctgtgtgtgtggacc

SEQ ID NO: 409283 - DNA, 20 bp, Artificial Sequence
  Description of Artificial Sequence: Synthetic oligonucleotide
  Target: LAMA2; (+) strand; PAM type: YTN; PAM sequence: CTC
tgtgtgtgtggacctactat

SEQ ID NO: 409284 - DNA, 20 bp, Artificial Sequence
  Description of Artificial Sequence: Synthetic oligonucleotide
  Target: LAMA2; (+) strand; PAM type: YTN; PAM sequence: CTG
tgtgtgtggacctactatgc

SEQ ID NO: 409285 - DNA, 20 bp, Artificial Sequence
  Description of Artificial Sequence: Synthetic oligonucleotide
  Target: LAMA2; (+) strand; PAM type: YTN; PAM sequence: CTA
ctatgcattgcaaaaggata

SEQ ID NO: 409286 - DNA, 20 bp, Artificial Sequence
  Description of Artificial Sequence: Synthetic oligonucleotide
  Target: LAMA2; (+) strand; PAM type: YTN; PAM sequence: CTA
tgcattgcaaaaggataccg

SEQ ID NO: 409287 - DNA, 20 bp, Artificial Sequence
  Description of Artificial Sequence: Synthetic oligonucleotide
  Target: LAMA2; (+) strand; PAM type: YTN; PAM sequence: TTG
caaaaggataccgtagctta

SEQ ID NO: 409288 - DNA, 20 bp, Artificial Sequence
  Description of Artificial Sequence: Synthetic oligonucleotide
  Target: LAMA2; (+) strand; PAM type: YTN; PAM sequence: CTT
aattccctcttctttacttt

SEQ ID NO: 409289 - DNA, 20 bp, Artificial Sequence
  Description of Artificial Sequence: Synthetic oligonucleotide
  Target: LAMA2; (+) strand; PAM type: YTN; PAM sequence: TTA
attccctcttctttactttt

SEQ ID NO: 409290 - DNA, 20 bp, Artificial Sequence
  Description of Artificial Sequence: Synthetic oligonucleotide
  Target: LAMA2; (+) strand; PAM type: YTN; PAM sequence: TTC
cctcttctttacttttcata

SEQ ID NO: 409291 - DNA, 20 bp, Artificial Sequence
  Description of Artificial Sequence: Synthetic oligonucleotide
  Target: LAMA2; (+) strand; PAM type: YTN; PAM sequence: CTC
ttctttacttttcatacttc

SEQ ID NO: 409292 - DNA, 20 bp, Artificial Sequence
  Description of Artificial Sequence: Synthetic oligonucleotide
  Target: LAMA2; (+) strand; PAM type: YTN; PAM sequence: CTT
ctttacttttcatacttcgg

SEQ ID NO: 409293 - DNA, 20 bp, Artificial Sequence
  Description of Artificial Sequence: Synthetic oligonucleotide
  Target: LAMA2; (+) strand; PAM type: YTN; PAM sequence: TTC
tttacttttcatacttcggg

SEQ ID NO: 409294 - DNA, 20 bp, Artificial Sequence
  Description of Artificial Sequence: Synthetic oligonucleotide
  Target: LAMA2; (+) strand; PAM type: YTN; PAM sequence: CTT
tacttttcatacttcgggaa

SEQ ID NO: 409295 - DNA, 20 bp, Artificial Sequence
  Description of Artificial Sequence: Synthetic oligonucleotide
  Target: LAMA2; (+) strand; PAM type: YTN; PAM sequence: TTT
acttttcatacttcgggaac

SEQ ID NO: 409296 - DNA, 20 bp, Artificial Sequence
  Description of Artificial Sequence: Synthetic oligonucleotide
  Target: LAMA2; (+) strand; PAM type: YTN; PAM sequence: TTA
cttttcatacttcgggaacc

SEQ ID NO: 409297 - DNA, 20 bp, Artificial Sequence
  Description of Artificial Sequence: Synthetic oligonucleotide
  Target: LAMA2; (+) strand; PAM type: YTN; PAM sequence: CTT
ttcatacttcgggaacctca

SEQ ID NO: 409298 - DNA, 20 bp, Artificial Sequence
  Description of Artificial Sequence: Synthetic oligonucleotide
  Target: LAMA2; (+) strand; PAM type: YTN; PAM sequence: TTT
tcatacttcgggaacctcat

SEQ ID NO: 409299 - DNA, 20 bp, Artificial Sequence
  Description of Artificial Sequence: Synthetic oligonucleotide
  Target: LAMA2; (+) strand; PAM type: YTN; PAM sequence: TTT
catacttcgggaacctcatt

SEQ ID NO: 409300 - DNA, 20 bp, Artificial Sequence
  Description of Artificial Sequence: Synthetic oligonucleotide
  Target: LAMA2; (+) strand; PAM type: YTN; PAM sequence: TTC
atacttcgggaacctcattt

SEQ ID NO: 409301 - DNA, 20 bp, Artificial Sequence
  Description of Artificial Sequence: Synthetic oligonucleotide
  Target: LAMA2; (+) strand; PAM type: YTN; PAM sequence: CTT
cgggaacctcatttgcctca

SEQ ID NO: 409302 - DNA, 20 bp, Artificial Sequence
  Description of Artificial Sequence: Synthetic oligonucleotide
  Target: LAMA2; (+) strand; PAM type: YTN; PAM sequence: TTC
gggaacctcatttgcctcag

SEQ ID NO: 409303 - DNA, 20 bp, Artificial Sequence
  Description of Artificial Sequence: Synthetic oligonucleotide
  Target: LAMA2; (+) strand; PAM type: YTN; PAM sequence: CTC
atttgcctcagcccttagga

SEQ ID NO: 409304 - DNA, 20 bp, Artificial Sequence
  Description of Artificial Sequence: Synthetic oligonucleotide
  Target: LAMA2; (+) strand; PAM type: YTN; PAM sequence: TTT
gcctcagcccttaggagttc

SEQ ID NO: 409305 - DNA, 20 bp, Artificial Sequence
  Description of Artificial Sequence: Synthetic oligonucleotide
  Target: LAMA2; (+) strand; PAM type: YTN; PAM sequence: TTG
cctcagcccttaggagttct

SEQ ID NO: 409306 - DNA, 20 bp, Artificial Sequence
  Description of Artificial Sequence: Synthetic oligonucleotide
  Target: LAMA2; (+) strand; PAM type: YTN; PAM sequence: CTC
agcccttaggagttctaccc

SEQ ID NO: 409307 - DNA, 20 bp, Artificial Sequence
  Description of Artificial Sequence: Synthetic oligonucleotide
  Target: LAMA2; (+) strand; PAM type: YTN; PAM sequence: CTT
aggagttctacccttaacat

SEQ ID NO: 409308 - DNA, 20 bp, Artificial Sequence
  Description of Artificial Sequence: Synthetic oligonucleotide
  Target: LAMA2; (+) strand; PAM type: YTN; PAM sequence: TTA
ggagttctacccttaacatt

SEQ ID NO: 409309 - DNA, 20 bp, Artificial Sequence
  Description of Artificial Sequence: Synthetic oligonucleotide
  Target: LAMA2; (+) strand; PAM type: YTN; PAM sequence: TTC
tacccttaacatttttattc

SEQ ID NO: 409310 - DNA, 20 bp, Artificial Sequence
  Description of Artificial Sequence: Synthetic oligonucleotide
  Target: LAMA2; (+) strand; PAM type: YTN; PAM sequence: CTA
cccttaacatttttattcgt

SEQ ID NO: 409311 - DNA, 20 bp, Artificial Sequence
  Description of Artificial Sequence: Synthetic oligonucleotide
  Target: LAMA2; (+) strand; PAM type: YTN; PAM sequence: CTT
aacatttttattcgtgcagt

SEQ ID NO: 409312 - DNA, 20 bp, Artificial Sequence
  Description of Artificial Sequence: Synthetic oligonucleotide
  Target: LAMA2; (+) strand; PAM type: YTN; PAM sequence: TTA
acatttttattcgtgcagtt

SEQ ID NO: 409313 - DNA, 20 bp, Artificial Sequence
  Description of Artificial Sequence: Synthetic oligonucleotide
  Target: LAMA2; (+) strand; PAM type: YTN; PAM sequence: TTT
ttattcgtgcagttatctcc

SEQ ID NO: 409314 - DNA, 20 bp, Artificial Sequence
  Description of Artificial Sequence: Synthetic oligonucleotide
  Target: LAMA2; (+) strand; PAM type: YTN; PAM sequence: TTT
tattcgtgcagttatctcca

SEQ ID NO: 409315 - DNA, 20 bp, Artificial Sequence
  Description of Artificial Sequence: Synthetic oligonucleotide
  Target: LAMA2; (+) strand; PAM type: YTN; PAM sequence: TTT
attcgtgcagttatctccac

SEQ ID NO: 409316 - DNA, 20 bp, Artificial Sequence
  Description of Artificial Sequence: Synthetic oligonucleotide
  Target: LAMA2; (+) strand; PAM type: YTN; PAM sequence: TTA
ttcgtgcagttatctccacc

SEQ ID NO: 409317 - DNA, 20 bp, Artificial Sequence
  Description of Artificial Sequence: Synthetic oligonucleotide
  Target: LAMA2; (+) strand; PAM type: YTN; PAM sequence: TTC
gtgcagttatctccaccttt

SEQ ID NO: 409318 - DNA, 20 bp, Artificial Sequence
  Description of Artificial Sequence: Synthetic oligonucleotide
  Target: LAMA2; (+) strand; PAM type: YTN; PAM sequence: TTA
tctccacctttggaaaaacc

SEQ ID NO: 409319 - DNA, 20 bp, Artificial Sequence
  Description of Artificial Sequence: Synthetic oligonucleotide
  Target: LAMA2; (+) strand; PAM type: YTN; PAM sequence: CTC
cacctttggaaaaaccaaat

SEQ ID NO: 409320 - DNA, 20 bp, Artificial Sequence
  Description of Artificial Sequence: Synthetic oligonucleotide
  Target: LAMA2; (+) strand; PAM type: YTN; PAM sequence: CTT
tggaaaaaccaaatgcattt

SEQ ID NO: 409321 - DNA, 20 bp, Artificial Sequence
  Description of Artificial Sequence: Synthetic oligonucleotide
  Target: LAMA2; (+) strand; PAM type: YTN; PAM sequence: TTT
ggaaaaaccaaatgcatttt

SEQ ID NO: 409322 - DNA, 20 bp, Artificial Sequence
  Description of Artificial Sequence: Synthetic oligonucleotide
  Target: LAMA2; (+) strand; PAM type: YTN; PAM sequence: TTG
gaaaaaccaaatgcattttc

SEQ ID NO: 409323 - DNA, 20 bp, Artificial Sequence
  Description of Artificial Sequence: Synthetic oligonucleotide
  Target: LAMA2; (+) strand; PAM type: YTN; PAM sequence: TTT
tctgaagctataaataagaa

SEQ ID NO: 409324 - DNA, 20 bp, Artificial Sequence
  Description of Artificial Sequence: Synthetic oligonucleotide
  Target: LAMA2; (+) strand; PAM type: YTN; PAM sequence: TTT
ctgaagctataaataagaaa

SEQ ID NO: 409325 - DNA, 20 bp, Artificial Sequence
  Description of Artificial Sequence: Synthetic oligonucleotide
  Target: LAMA2; (+) strand; PAM type: YTN; PAM sequence: TTC
tgaagctataaataagaaaa

SEQ ID NO: 409326 - DNA, 20 bp, Artificial Sequence
  Description of Artificial Sequence: Synthetic oligonucleotide
  Target: LAMA2; (+) strand; PAM type: YTN; PAM sequence: CTG
aagctataaataagaaaaat

SEQ ID NO: 409327 - DNA, 20 bp, Artificial Sequence
  Description of Artificial Sequence: Synthetic oligonucleotide
  Target: LAMA2; (+) strand; PAM type: YTN; PAM sequence: CTA
taaataagaaaaatccctcc

SEQ ID NO: 409328 - DNA, 20 bp, Artificial Sequence
  Description of Artificial Sequence: Synthetic oligonucleotide
  Target: LAMA2; (+) strand; PAM type: YTN; PAM sequence: CTC
cctctgcccctcttaaatat

SEQ ID NO: 409329 - DNA, 20 bp, Artificial Sequence
  Description of Artificial Sequence: Synthetic oligonucleotide
  Target: LAMA2; (+) strand; PAM type: YTN; PAM sequence: CTC
tgcccctcttaaatattacc

SEQ ID NO: 409330 - DNA, 20 bp, Artificial Sequence
  Description of Artificial Sequence: Synthetic oligonucleotide
  Target: LAMA2; (+) strand; PAM type: YTN; PAM sequence: CTG
cccctcttaaatattacctc

SEQ ID NO: 409331 - DNA, 20 bp, Artificial Sequence
  Description of Artificial Sequence: Synthetic oligonucleotide
  Target: LAMA2; (+) strand; PAM type: YTN; PAM sequence: CTC
ttaaatattacctcctcaaa

SEQ ID NO: 409332 - DNA, 20 bp, Artificial Sequence
  Description of Artificial Sequence: Synthetic oligonucleotide
  Target: LAMA2; (+) strand; PAM type: YTN; PAM sequence: CTT
aaatattacctcctcaaata

SEQ ID NO: 409333 - DNA, 20 bp, Artificial Sequence
  Description of Artificial Sequence: Synthetic oligonucleotide
  Target: LAMA2; (+) strand; PAM type: YTN; PAM sequence: TTA
aatattacctcctcaaataa

SEQ ID NO: 409334 - DNA, 20 bp, Artificial Sequence
  Description of Artificial Sequence: Synthetic oligonucleotide
  Target: LAMA2; (+) strand; PAM type: YTN; PAM sequence: TTA
cctcctcaaataaggtatgc

SEQ ID NO: 409335 - DNA, 20 bp, Artificial Sequence
  Description of Artificial Sequence: Synthetic oligonucleotide
  Target: LAMA2; (+) strand; PAM type: YTN; PAM sequence: CTC
ctcaaataaggtatgcacac

SEQ ID NO: 409336 - DNA, 20 bp, Artificial Sequence
  Description of Artificial Sequence: Synthetic oligonucleotide
  Target: LAMA2; (+) strand; PAM type: YTN; PAM sequence: CTC
aaataaggtatgcacacagc

SEQ ID NO: 409337 - DNA, 20 bp, Artificial Sequence
  Description of Artificial Sequence: Synthetic oligonucleotide
  Target: LAMA2; (+) strand; PAM type: YTN; PAM sequence: CTC
acaaatcagctccactggag

SEQ ID NO: 409338 - DNA, 20 bp, Artificial Sequence
  Description of Artificial Sequence: Synthetic oligonucleotide
  Target: LAMA2; (+) strand; PAM type: YTN; PAM sequence: CTC
cactggagccagcaggcttt

SEQ ID NO: 409339 - DNA, 20 bp, Artificial Sequence
  Description of Artificial Sequence: Synthetic oligonucleotide
  Target: LAMA2; (+) strand; PAM type: YTN; PAM sequence: CTG
gagccagcaggctttggcgg

SEQ ID NO: 409340 - DNA, 20 bp, Artificial Sequence
  Description of Artificial Sequence: Synthetic oligonucleotide
  Target: LAMA2; (+) strand; PAM type: YTN; PAM sequence: CTT
tggcggtttctatctcattc

SEQ ID NO: 409341 - DNA, 20 bp, Artificial Sequence
  Description of Artificial Sequence: Synthetic oligonucleotide
  Target: LAMA2; (+) strand; PAM type: YTN; PAM sequence: TTT
ggcggtttctatctcattca

SEQ ID NO: 409342 - DNA, 20 bp, Artificial Sequence
  Description of Artificial Sequence: Synthetic oligonucleotide
  Target: LAMA2; (+) strand; PAM type: YTN; PAM sequence: TTG
gcggtttctatctcattcag

SEQ ID NO: 409343 - DNA, 20 bp, Artificial Sequence
  Description of Artificial Sequence: Synthetic oligonucleotide
  Target: LAMA2; (+) strand; PAM type: YTN; PAM sequence: TTT
ctatctcattcaggttccaa

SEQ ID NO: 409344 - DNA, 20 bp, Artificial Sequence
  Description of Artificial Sequence: Synthetic oligonucleotide
  Target: LAMA2; (+) strand; PAM type: YTN; PAM sequence: TTC
tatctcattcaggttccaaa

SEQ ID NO: 409345 - DNA, 20 bp, Artificial Sequence
  Description of Artificial Sequence: Synthetic oligonucleotide
  Target: LAMA2; (+) strand; PAM type: YTN; PAM sequence: CTA
tctcattcaggttccaaagc

SEQ ID NO: 409346 - DNA, 20 bp, Artificial Sequence
  Description of Artificial Sequence: Synthetic oligonucleotide
  Target: LAMA2; (+) strand; PAM type: YTN; PAM sequence: CTC
attcaggttccaaagcagtt

SEQ ID NO: 409347 - DNA, 20 bp, Artificial Sequence
  Description of Artificial Sequence: Synthetic oligonucleotide
  Target: LAMA2; (+) strand; PAM type: YTN; PAM sequence: TTC
aggttccaaagcagttatgg

SEQ ID NO: 409348 - DNA, 20 bp, Artificial Sequence
  Description of Artificial Sequence: Synthetic oligonucleotide
  Target: LAMA2; (+) strand; PAM type: YTN; PAM sequence: TTC
caaagcagttatggcagctg

SEQ ID NO: 409349 - DNA, 20 bp, Artificial Sequence
  Description of Artificial Sequence: Synthetic oligonucleotide
  Target: LAMA2; (+) strand; PAM type: YTN; PAM sequence: TTA
tggcagctgcttagctgtca

SEQ ID NO: 409350 - DNA, 20 bp, Artificial Sequence
  Description of Artificial Sequence: Synthetic oligonucleotide
  Target: LAMA2; (+) strand; PAM type: YTN; PAM sequence: CTG
cttagctgtcacagatacag

SEQ ID NO: 409351 - DNA, 20 bp, Artificial Sequence
  Description of Artificial Sequence: Synthetic oligonucleotide
  Target: LAMA2; (+) strand; PAM type: YTN; PAM sequence: CTT
agctgtcacagatacagagt

SEQ ID NO: 409352 - DNA, 20 bp, Artificial Sequence
  Description of Artificial Sequence: Synthetic oligonucleotide
  Target: LAMA2; (+) strand; PAM type: YTN; PAM sequence: TTA
gctgtcacagatacagagtg

SEQ ID NO: 409353 - DNA, 20 bp, Artificial Sequence
  Description of Artificial Sequence: Synthetic oligonucleotide
  Target: LAMA2; (+) strand; PAM type: YTN; PAM sequence: CTG
tcacagatacagagtgtggc

SEQ ID NO: 409354 - DNA, 20 bp, Artificial Sequence
  Description of Artificial Sequence: Synthetic oligonucleotide
  Target: LAMA2; (+) strand; PAM type: YTN; PAM sequence: CTG
caggacctattgagcctatt

SEQ ID NO: 409355 - DNA, 20 bp, Artificial Sequence
  Description of Artificial Sequence: Synthetic oligonucleotide
  Target: LAMA2; (+) strand; PAM type: YTN; PAM sequence: CTA
ttgagcctattaagtgcata

SEQ ID NO: 409356 - DNA, 20 bp, Artificial Sequence
  Description of Artificial Sequence: Synthetic oligonucleotide
  Target: LAMA2; (+) strand; PAM type: YTN; PAM sequence: TTG
agcctattaagtgcatatct

SEQ ID NO: 409357 - DNA, 20 bp, Artificial Sequence
  Description of Artificial Sequence: Synthetic oligonucleotide
  Target: LAMA2; (+) strand; PAM type: YTN; PAM sequence: CTA
ttaagtgcatatcttgtccc

SEQ ID NO: 409358 - DNA, 20 bp, Artificial Sequence
  Description of Artificial Sequence: Synthetic oligonucleotide
  Target: LAMA2; (+) strand; PAM type: YTN; PAM sequence: TTA
agtgcatatcttgtccctgt

SEQ ID NO: 409359 - DNA, 20 bp, Artificial Sequence
  Description of Artificial Sequence: Synthetic oligonucleotide
  Target: LAMA2; (+) strand; PAM type: YTN; PAM sequence: CTT
gtccctgtcccccttcccaa

SEQ ID NO: 409360 - DNA, 20 bp, Artificial Sequence
  Description of Artificial Sequence: Synthetic oligonucleotide
  Target: LAMA2; (+) strand; PAM type: YTN; PAM sequence: TTG
tccctgtcccccttcccaag

SEQ ID NO: 409361 - DNA, 20 bp, Artificial Sequence
  Description of Artificial Sequence: Synthetic oligonucleotide
  Target: LAMA2; (+) strand; PAM type: YTN; PAM sequence: CTG
tcccccttcccaaggtttgc

SEQ ID NO: 409362 - DNA, 20 bp, Artificial Sequence
  Description of Artificial Sequence: Synthetic oligonucleotide
  Target: LAMA2; (+) strand; PAM type: YTN; PAM sequence: CTT
cccaaggtttgcagggtccc

SEQ ID NO: 409363 - DNA, 20 bp, Artificial Sequence
  Description of Artificial Sequence: Synthetic oligonucleotide
  Target: LAMA2; (+) strand; PAM type: YTN; PAM sequence: TTC
ccaaggtttgcagggtccct

SEQ ID NO: 409364 - DNA, 20 bp, Artificial Sequence
  Description of Artificial Sequence: Synthetic oligonucleotide
  Target: LAMA2; (+) strand; PAM type: YTN; PAM sequence: TTT
gcagggtccctgcagagtgg

SEQ ID NO: 409365 - DNA, 20 bp, Artificial Sequence
  Description of Artificial Sequence: Synthetic oligonucleotide
  Target: LAMA2; (+) strand; PAM type: YTN; PAM sequence: TTG
cagggtccctgcagagtggc

SEQ ID NO: 409366 - DNA, 20 bp, Artificial Sequence
  Description of Artificial Sequence: Synthetic oligonucleotide
  Target: LAMA2; (+) strand; PAM type: YTN; PAM sequence: CTG
cagagtggctttctgaggga

SEQ ID NO: 409367 - DNA, 20 bp, Artificial Sequence
  Description of Artificial Sequence: Synthetic oligonucleotide
  Target: LAMA2; (+) strand; PAM type: YTN; PAM sequence: CTT
tctgagggaacagaatcaag

SEQ ID NO: 409368 - DNA, 20 bp, Artificial Sequence
  Description of Artificial Sequence: Synthetic oligonucleotide
  Target: LAMA2; (+) strand; PAM type: YTN; PAM sequence: TTT
ctgagggaacagaatcaagg

SEQ ID NO: 409369 - DNA, 20 bp, Artificial Sequence
  Description of Artificial Sequence: Synthetic oligonucleotide
  Target: LAMA2; (+) strand; PAM type: YTN; PAM sequence: TTC
tgagggaacagaatcaaggg

SEQ ID NO: 409370 - DNA, 20 bp, Artificial Sequence
  Description of Artificial Sequence: Synthetic oligonucleotide
  Target: LAMA2; (+) strand; PAM type: YTN; PAM sequence: CTG
agggaacagaatcaagggag

SEQ ID NO: 409371 - DNA, 20 bp, Artificial Sequence
  Description of Artificial Sequence: Synthetic oligonucleotide
  Target: LAMA2; (+) strand; PAM type: YTN; PAM sequence: CTG
ctgccctgagcctggccacc

SEQ ID NO: 409372 - DNA, 20 bp, Artificial Sequence
  Description of Artificial Sequence: Synthetic oligonucleotide
  Target: LAMA2; (+) strand; PAM type: YTN; PAM sequence: CTG
ccctgagcctggccaccttt

SEQ ID NO: 409373 - DNA, 20 bp, Artificial Sequence
  Description of Artificial Sequence: Synthetic oligonucleotide
  Target: LAMA2; (+) strand; PAM type: YTN; PAM sequence: CTG
agcctggccacctttttaca

SEQ ID NO: 409374 - DNA, 20 bp, Artificial Sequence
  Description of Artificial Sequence: Synthetic oligonucleotide
  Target: LAMA2; (+) strand; PAM type: YTN; PAM sequence: CTG
gccacctttttacaaatcta

SEQ ID NO: 409375 - DNA, 20 bp, Artificial Sequence
  Description of Artificial Sequence: Synthetic oligonucleotide
  Target: LAMA2; (+) strand; PAM type: YTN; PAM sequence: CTT
tttacaaatctaccagagtg

SEQ ID NO: 409376 - DNA, 20 bp, Artificial Sequence
  Description of Artificial Sequence: Synthetic oligonucleotide
  Target: LAMA2; (+) strand; PAM type: YTN; PAM sequence: TTT
ttacaaatctaccagagtgc

SEQ ID NO: 409377 - DNA, 20 bp, Artificial Sequence
  Description of Artificial Sequence: Synthetic oligonucleotide
  Target: LAMA2; (+) strand; PAM type: YTN; PAM sequence: TTT
tacaaatctaccagagtgct

SEQ ID NO: 409378 - DNA, 20 bp, Artificial Sequence
  Description of Artificial Sequence: Synthetic oligonucleotide
  Target: LAMA2; (+) strand; PAM type: YTN; PAM sequence: TTT
acaaatctaccagagtgctt

SEQ ID NO: 409379 - DNA, 20 bp, Artificial Sequence
  Description of Artificial Sequence: Synthetic oligonucleotide
  Target: LAMA2; (+) strand; PAM type: YTN; PAM sequence: TTA
caaatctaccagagtgcttg

SEQ ID NO: 409380 - DNA, 20 bp, Artificial Sequence
  Description of Artificial Sequence: Synthetic oligonucleotide
  Target: LAMA2; (+) strand; PAM type: YTN; PAM sequence: CTA
ccagagtgcttgccccagcc

SEQ ID NO: 409381 - DNA, 20 bp, Artificial Sequence
  Description of Artificial Sequence: Synthetic oligonucleotide
  Target: LAMA2; (+) strand; PAM type: YTN; PAM sequence: CTT
gccccagccctgggccaggg

SEQ ID NO: 409382 - DNA, 20 bp, Artificial Sequence
  Description of Artificial Sequence: Synthetic oligonucleotide
  Target: LAMA2; (+) strand; PAM type: YTN; PAM sequence: TTG
ccccagccctgggccaggga

SEQ ID NO: 409383 - DNA, 20 bp, Artificial Sequence
  Description of Artificial Sequence: Synthetic oligonucleotide
  Target: LAMA2; (+) strand; PAM type: YTN; PAM sequence: CTG
ggccagggaattggctttac

SEQ ID NO: 409384 - DNA, 20 bp, Artificial Sequence
  Description of Artificial Sequence: Synthetic oligonucleotide
  Target: LAMA2; (+) strand; PAM type: YTN; PAM sequence: TTG
gctttactcatgcacaaact

SEQ ID NO: 409385 - DNA, 20 bp, Artificial Sequence
  Description of Artificial Sequence: Synthetic oligonucleotide
  Target: LAMA2; (+) strand; PAM type: YTN; PAM sequence: CTT
tactcatgcacaaactgatg

SEQ ID NO: 409386 - DNA, 20 bp, Artificial Sequence
  Description of Artificial Sequence: Synthetic oligonucleotide
  Target: LAMA2; (+) strand; PAM type: YTN; PAM sequence: TTT
actcatgcacaaactgatga

SEQ ID NO: 409387 - DNA, 20 bp, Artificial Sequence
  Description of Artificial Sequence: Synthetic oligonucleotide
  Target: LAMA2; (+) strand; PAM type: YTN; PAM sequence: TTA
ctcatgcacaaactgatgac

SEQ ID NO: 409388 - DNA, 20 bp, Artificial Sequence
  Description of Artificial Sequence: Synthetic oligonucleotide
  Target: LAMA2; (+) strand; PAM type: YTN; PAM sequence: CTC
atgcacaaactgatgacttt

SEQ ID NO: 409389 - DNA, 20 bp, Artificial Sequence
  Description of Artificial Sequence: Synthetic oligonucleotide
  Target: LAMA2; (+) strand; PAM type: YTN; PAM sequence: CTG
atgactttctttagaatgct

SEQ ID NO: 409390 - DNA, 20 bp, Artificial Sequence
  Description of Artificial Sequence: Synthetic oligonucleotide
  Target: LAMA2; (+) strand; PAM type: YTN; PAM sequence: CTT
tctttagaatgctgcaatac

SEQ ID NO: 409391 - DNA, 20 bp, Artificial Sequence
  Description of Artificial Sequence: Synthetic oligonucleotide
  Target: LAMA2; (+) strand; PAM type: YTN; PAM sequence: TTT
ctttagaatgctgcaatact

SEQ ID NO: 409392 - DNA, 20 bp, Artificial Sequence
  Description of Artificial Sequence: Synthetic oligonucleotide
  Target: LAMA2; (+) strand; PAM type: YTN; PAM sequence: TTC
tttagaatgctgcaatactt

SEQ ID NO: 409393 - DNA, 20 bp, Artificial Sequence
  Description of Artificial Sequence: Synthetic oligonucleotide
  Target: LAMA2; (+) strand; PAM type: YTN; PAM sequence: CTT
tagaatgctgcaatacttta

SEQ ID NO: 409394 - DNA, 20 bp, Artificial Sequence
  Description of Artificial Sequence: Synthetic oligonucleotide
  Target: LAMA2; (+) strand; PAM type: YTN; PAM sequence: TTT
agaatgctgcaatactttat

SEQ ID NO: 409395 - DNA, 20 bp, Artificial Sequence
  Description of Artificial Sequence: Synthetic oligonucleotide
  Target: LAMA2; (+) strand; PAM type: YTN; PAM sequence: TTA
gaatgctgcaatactttata

SEQ ID NO: 409396 - DNA, 20 bp, Artificial Sequence
  Description of Artificial Sequence: Synthetic oligonucleotide
  Target: LAMA2; (+) strand; PAM type: YTN; PAM sequence: CTG
caatactttatacttacttt

SEQ ID NO: 409397 - DNA, 20 bp, Artificial Sequence
  Description of Artificial Sequence: Synthetic oligonucleotide
  Target: LAMA2; (+) strand; PAM type: YTN; PAM sequence: CTT
tatacttactttattaggaa

SEQ ID NO: 409398 - DNA, 20 bp, Artificial Sequence
  Description of Artificial Sequence: Synthetic oligonucleotide
  Target: LAMA2; (+) strand; PAM type: YTN; PAM sequence: TTT
atacttactttattaggaaa

SEQ ID NO: 409399 - DNA, 20 bp, Artificial Sequence
  Description of Artificial Sequence: Synthetic oligonucleotide
  Target: LAMA2; (+) strand; PAM type: YTN; PAM sequence: TTA
tacttactttattaggaaag

SEQ ID NO: 409400 - DNA, 20 bp, Artificial Sequence
  Description of Artificial Sequence: Synthetic oligonucleotide
  Target: LAMA2; (+) strand; PAM type: YTN; PAM sequence: CTT
actttattaggaaagtcatc

SEQ ID NO: 409401 - DNA, 20 bp, Artificial Sequence
  Description of Artificial Sequence: Synthetic oligonucleotide
  Target: LAMA2; (+) strand; PAM type: YTN; PAM sequence: TTA
ctttattaggaaagtcatct

SEQ ID NO: 409402 - DNA, 20 bp, Artificial Sequence
  Description of Artificial Sequence: Synthetic oligonucleotide
  Target: LAMA2; (+) strand; PAM type: YTN; PAM sequence: CTT
tattaggaaagtcatctgta

SEQ ID NO: 409403 - DNA, 20 bp, Artificial Sequence
  Description of Artificial Sequence: Synthetic oligonucleotide
  Target: LAMA2; (+) strand; PAM type: YTN; PAM sequence: TTT
attaggaaagtcatctgtat

SEQ ID NO: 409404 - DNA, 20 bp, Artificial Sequence
  Description of Artificial Sequence: Synthetic oligonucleotide
  Target: LAMA2; (+) strand; PAM type: YTN; PAM sequence: TTA
ttaggaaagtcatctgtatt

SEQ ID NO: 409405 - DNA, 20 bp, Artificial Sequence
  Description of Artificial Sequence: Synthetic oligonucleotide
  Target: LAMA2; (+) strand; PAM type: YTN; PAM sequence: TTA
ggaaagtcatctgtattttt

SEQ ID NO: 409406 - DNA, 20 bp, Artificial Sequence
  Description of Artificial Sequence: Synthetic oligonucleotide
  Target: LAMA2; (+) strand; PAM type: YTN; PAM sequence: CTG
tatttttcatcaaaatattg

SEQ ID NO: 409407 - DNA, 20 bp, Artificial Sequence
  Description of Artificial Sequence: Synthetic oligonucleotide
  Target: LAMA2; (+) strand; PAM type: YTN; PAM sequence: TTT
ttcatcaaaatattgtatga

SEQ ID NO: 409408 - DNA, 20 bp, Artificial Sequence
  Description of Artificial Sequence: Synthetic oligonucleotide
  Target: LAMA2; (+) strand; PAM type: YTN; PAM sequence: TTT
tcatcaaaatattgtatgac

SEQ ID NO: 409409 - DNA, 20 bp, Artificial Sequence
  Description of Artificial Sequence: Synthetic oligonucleotide
  Target: LAMA2; (+) strand; PAM type: YTN; PAM sequence: TTT
catcaaaatattgtatgaca

SEQ ID NO: 409410 - DNA, 20 bp, Artificial Sequence
  Description of Artificial Sequence: Synthetic oligonucleotide
  Target: LAMA2; (+) strand; PAM type: YTN; PAM sequence: TTC
atcaaaatattgtatgacaa

SEQ ID NO: 409411 - DNA, 20 bp, Artificial Sequence
  Description of Artificial Sequence: Synthetic oligonucleotide
  Target: LAMA2; (+) strand; PAM type: YTN; PAM sequence: TTG
tatgacaactcagagagata

SEQ ID NO: 409412 - DNA, 20 bp, Artificial Sequence
  Description of Artificial Sequence: Synthetic oligonucleotide
  Target: LAMA2; (+) strand; PAM type: YTN; PAM sequence: CTC
agagagataattagtttaga

SEQ ID NO: 409413 - DNA, 20 bp, Artificial Sequence
  Description of Artificial Sequence: Synthetic oligonucleotide
  Target: LAMA2; (+) strand; PAM type: YTN; PAM sequence: TTA
gtttagaaggacaattagag

SEQ ID NO: 409414 - DNA, 20 bp, Artificial Sequence
  Description of Artificial Sequence: Synthetic oligonucleotide
  Target: LAMA2; (+) strand; PAM type: YTN; PAM sequence: TTT
agaaggacaattagagaaaa

SEQ ID NO: 409415 - DNA, 20 bp, Artificial Sequence
  Description of Artificial Sequence: Synthetic oligonucleotide
  Target: LAMA2; (+) strand; PAM type: YTN; PAM sequence: TTA
gaaggacaattagagaaaaa

SEQ ID NO: 409416 - DNA, 20 bp, Artificial Sequence
  Description of Artificial Sequence: Synthetic oligonucleotide
  Target: LAMA2; (+) strand; PAM type: YTN; PAM sequence: TTA
gagaaaaaagaaacagaagc

SEQ ID NO: 409417 - DNA, 20 bp, Artificial Sequence
  Description of Artificial Sequence: Synthetic oligonucleotide
  Target: LAMA2; (+) strand; PAM type: YTN; PAM sequence: CTT
caggggttcagacctccaag

SEQ ID NO: 409418 - DNA, 20 bp, Artificial Sequence
  Description of Artificial Sequence: Synthetic oligonucleotide
  Target: LAMA2; (+) strand; PAM type: YTN; PAM sequence: TTC
aggggttcagacctccaagc

SEQ ID NO: 409419 - DNA, 20 bp, Artificial Sequence
  Description of Artificial Sequence: Synthetic oligonucleotide
  Target: LAMA2; (+) strand; PAM type: YTN; PAM sequence: TTC
agacctccaagccagcaatc

SEQ ID NO: 409420 - DNA, 20 bp, Artificial Sequence
  Description of Artificial Sequence: Synthetic oligonucleotide
  Target: LAMA2; (+) strand; PAM type: YTN; PAM sequence: CTC
caagccagcaatccatttat

SEQ ID NO: 409421 - DNA, 20 bp, Artificial Sequence
  Description of Artificial Sequence: Synthetic oligonucleotide
  Target: LAMA2; (+) strand; PAM type: YTN; PAM sequence: TTT
atcagactgaagacatagaa

SEQ ID NO: 409422 - DNA, 20 bp, Artificial Sequence
  Description of Artificial Sequence: Synthetic oligonucleotide
  Target: LAMA2; (+) strand; PAM type: YTN; PAM sequence: TTA
tcagactgaagacatagaaa

SEQ ID NO: 409423 - DNA, 20 bp, Artificial Sequence
  Description of Artificial Sequence: Synthetic oligonucleotide
  Target: LAMA2; (+) strand; PAM type: YTN; PAM sequence: CTG
aagacatagaaaagaactgg

SEQ ID NO: 409424 - DNA, 20 bp, Artificial Sequence
  Description of Artificial Sequence: Synthetic oligonucleotide
  Target: LAMA2; (+) strand; PAM type: YTN; PAM sequence: CTG
gaaatccaatttgatgaggc

SEQ ID NO: 409425 - DNA, 20 bp, Artificial Sequence
  Description of Artificial Sequence: Synthetic oligonucleotide
  Target: LAMA2; (+) strand; PAM type: YTN; PAM sequence: TTT
gatgaggcctcaaaacacag

SEQ ID NO: 409426 - DNA, 20 bp, Artificial Sequence
  Description of Artificial Sequence: Synthetic oligonucleotide
  Target: LAMA2; (+) strand; PAM type: YTN; PAM sequence: TTG
atgaggcctcaaaacacaga

SEQ ID NO: 409427 - DNA, 20 bp, Artificial Sequence
  Description of Artificial Sequence: Synthetic oligonucleotide
  Target: LAMA2; (+) strand; PAM type: YTN; PAM sequence: CTC
aaaacacagaggatactttt

SEQ ID NO: 409428 - DNA, 20 bp, Artificial Sequence
  Description of Artificial Sequence: Synthetic oligonucleotide
  Target: LAMA2; (+) strand; PAM type: YTN; PAM sequence: CTT
ttaaatgcaacgagtatgaa

SEQ ID NO: 409429 - DNA, 20 bp, Artificial Sequence
  Description of Artificial Sequence: Synthetic oligonucleotide
  Target: LAMA2; (+) strand; PAM type: YTN; PAM sequence: TTT
taaatgcaacgagtatgaat

SEQ ID NO: 409430 - DNA, 20 bp, Artificial Sequence
  Description of Artificial Sequence: Synthetic oligonucleotide
  Target: LAMA2; (+) strand; PAM type: YTN; PAM sequence: TTT
aaatgcaacgagtatgaata

SEQ ID NO: 409431 - DNA, 20 bp, Artificial Sequence
  Description of Artificial Sequence: Synthetic oligonucleotide
  Target: LAMA2; (+) strand; PAM type: YTN; PAM sequence: TTA
aatgcaacgagtatgaatat

SEQ ID NO: 409432 - DNA, 20 bp, Artificial Sequence
  Description of Artificial Sequence: Synthetic oligonucleotide
  Target: LAMA2; (+) strand; PAM type: YTN; PAM sequence: TTC
agccaagccaatactatcct

SEQ ID NO: 409433 - DNA, 20 bp, Artificial Sequence
  Description of Artificial Sequence: Synthetic oligonucleotide
  Target: LAMA2; (+) strand; PAM type: YTN; PAM sequence: CTA
tcctgcagtgaaagacctac

SEQ ID NO: 409434 - DNA, 20 bp, Artificial Sequence
  Description of Artificial Sequence: Synthetic oligonucleotide
  Target: LAMA2; (+) strand; PAM type: YTN; PAM sequence: CTG
cagtgaaagacctacattta

SEQ ID NO: 409435 - DNA, 20 bp, Artificial Sequence
  Description of Artificial Sequence: Synthetic oligonucleotide
  Target: LAMA2; (+) strand; PAM type: YTN; PAM sequence: CTA
catttactaattatcctctt

SEQ ID NO: 409436 - DNA, 20 bp, Artificial Sequence
  Description of Artificial Sequence: Synthetic oligonucleotide
  Target: LAMA2; (+) strand; PAM type: YTN; PAM sequence: TTT
actaattatcctcttgggga

SEQ ID NO: 409437 - DNA, 20 bp, Artificial Sequence
  Description of Artificial Sequence: Synthetic oligonucleotide
  Target: LAMA2; (+) strand; PAM type: YTN; PAM sequence: TTA
ctaattatcctcttggggaa

SEQ ID NO: 409438 - DNA, 20 bp, Artificial Sequence
  Description of Artificial Sequence: Synthetic oligonucleotide
  Target: LAMA2; (+) strand; PAM type: YTN; PAM sequence: CTA
attatcctcttggggaaaac

SEQ ID NO: 409439 - DNA, 20 bp, Artificial Sequence
  Description of Artificial Sequence: Synthetic oligonucleotide
  Target: LAMA2; (+) strand; PAM type: YTN; PAM sequence: TTA
tcctcttggggaaaacattt

SEQ ID NO: 409440 - DNA, 20 bp, Artificial Sequence
  Description of Artificial Sequence: Synthetic oligonucleotide
  Target: LAMA2; (+) strand; PAM type: YTN; PAM sequence: CTC
ttggggaaaacatttagata

SEQ ID NO: 409441 - DNA, 20 bp, Artificial Sequence
  Description of Artificial Sequence: Synthetic oligonucleotide
  Target: LAMA2; (+) strand; PAM type: YTN; PAM sequence: CTT
ggggaaaacatttagataag

SEQ ID NO: 409442 - DNA, 20 bp, Artificial Sequence
  Description of Artificial Sequence: Synthetic oligonucleotide
  Target: LAMA2; (+) strand; PAM type: YTN; PAM sequence: TTG
gggaaaacatttagataagc

SEQ ID NO: 409443 - DNA, 20 bp, Artificial Sequence
  Description of Artificial Sequence: Synthetic oligonucleotide
  Target: LAMA2; (+) strand; PAM type: YTN; PAM sequence: TTT
agataagcaataaagatttc

SEQ ID NO: 409444 - DNA, 20 bp, Artificial Sequence
  Description of Artificial Sequence: Synthetic oligonucleotide
  Target: LAMA2; (+) strand; PAM type: YTN; PAM sequence: TTA
gataagcaataaagatttct

SEQ ID NO: 409445 - DNA, 20 bp, Artificial Sequence
  Description of Artificial Sequence: Synthetic oligonucleotide
  Target: LAMA2; (+) strand; PAM type: YTN; PAM sequence: TTT
cttaccttctaagtaaacaa

SEQ ID NO: 409446 - DNA, 20 bp, Artificial Sequence
  Description of Artificial Sequence: Synthetic oligonucleotide
  Target: LAMA2; (+) strand; PAM type: YTN; PAM sequence: TTC
ttaccttctaagtaaacaac

SEQ ID NO: 409447 - DNA, 20 bp, Artificial Sequence
  Description of Artificial Sequence: Synthetic oligonucleotide
  Target: LAMA2; (+) strand; PAM type: YTN; PAM sequence: CTT
accttctaagtaaacaacaa

SEQ ID NO: 409448 - DNA, 20 bp, Artificial Sequence
  Description of Artificial Sequence: Synthetic oligonucleotide
  Target: LAMA2; (+) strand; PAM type: YTN; PAM sequence: TTA
ccttctaagtaaacaacaaa

SEQ ID NO: 409449 - DNA, 20 bp, Artificial Sequence
  Description of Artificial Sequence: Synthetic oligonucleotide
  Target: LAMA2; (+) strand; PAM type: YTN; PAM sequence: CTT
ctaagtaaacaacaaagctt

SEQ ID NO: 409450 - DNA, 20 bp, Artificial Sequence
  Description of Artificial Sequence: Synthetic oligonucleotide
  Target: LAMA2; (+) strand; PAM type: YTN; PAM sequence: TTC
taagtaaacaacaaagcttt

SEQ ID NO: 409451 - DNA, 20 bp, Artificial Sequence
  Description of Artificial Sequence: Synthetic oligonucleotide
  Target: LAMA2; (+) strand; PAM type: YTN; PAM sequence: CTA
agtaaacaacaaagctttcc

SEQ ID NO: 409452 - DNA, 20 bp, Artificial Sequence
  Description of Artificial Sequence: Synthetic oligonucleotide
  Target: LAMA2; (+) strand; PAM type: YTN; PAM sequence: CTT
tcctcagtttttattattat

SEQ ID NO: 409453 - DNA, 20 bp, Artificial Sequence
  Description of Artificial Sequence: Synthetic oligonucleotide
  Target: LAMA2; (+) strand; PAM type: YTN; PAM sequence: TTT
cctcagtttttattattatt

SEQ ID NO: 409454 - DNA, 20 bp, Artificial Sequence
  Description of Artificial Sequence: Synthetic oligonucleotide
  Target: LAMA2; (+) strand; PAM type: YTN; PAM sequence: TTC
ctcagtttttattattatta

SEQ ID NO: 409455 - DNA, 20 bp, Artificial Sequence
  Description of Artificial Sequence: Synthetic oligonucleotide
  Target: LAMA2; (+) strand; PAM type: YTN; PAM sequence: CTC
agtttttattattattatta

SEQ ID NO: 409456 - DNA, 20 bp, Artificial Sequence
  Description of Artificial Sequence: Synthetic oligonucleotide
  Target: LAMA2; (+) strand; PAM type: YTN; PAM sequence: TTT
ttattattattattattagg

SEQ ID NO: 409457 - DNA, 20 bp, Artificial Sequence
  Description of Artificial Sequence: Synthetic oligonucleotide
  Target: LAMA2; (+) strand; PAM type: YTN; PAM sequence: TTT
tattattattattattaggt

SEQ ID NO: 409458 - DNA, 20 bp, Artificial Sequence
  Description of Artificial Sequence: Synthetic oligonucleotide
  Target: LAMA2; (+) strand; PAM type: YTN; PAM sequence: TTT
attattattattattaggta

SEQ ID NO: 409459 - DNA, 20 bp, Artificial Sequence
  Description of Artificial Sequence: Synthetic oligonucleotide
  Target: LAMA2; (+) strand; PAM type: YTN; PAM sequence: TTA
ttattattattattaggtag

SEQ ID NO: 409460 - DNA, 20 bp, Artificial Sequence
  Description of Artificial Sequence: Synthetic oligonucleotide
  Target: LAMA2; (+) strand; PAM type: YTN; PAM sequence: TTA
ttattattattaggtagagg

SEQ ID NO: 409461 - DNA, 20 bp, Artificial Sequence
  Description of Artificial Sequence: Synthetic oligonucleotide
  Target: LAMA2; (+) strand; PAM type: YTN; PAM sequence: TTA
ttattattaggtagaggatt

SEQ ID NO: 409462 - DNA, 20 bp, Artificial Sequence
  Description of Artificial Sequence: Synthetic oligonucleotide
  Target: LAMA2; (+) strand; PAM type: YTN; PAM sequence: TTA
ttattaggtagaggattagg

SEQ ID NO: 409463 - DNA, 20 bp, Artificial Sequence
  Description of Artificial Sequence: Synthetic oligonucleotide
  Target: LAMA2; (+) strand; PAM type: YTN; PAM sequence: TTA
ttaggtagaggattaggctg

SEQ ID NO: 409464 - DNA, 20 bp, Artificial Sequence
  Description of Artificial Sequence: Synthetic oligonucleotide
  Target: LAMA2; (+) strand; PAM type: YTN; PAM sequence: TTA
ggtagaggattaggctgtag

SEQ ID NO: 409465 - DNA, 20 bp, Artificial Sequence
  Description of Artificial Sequence: Synthetic oligonucleotide
  Target: LAMA2; (+) strand; PAM type: YTN; PAM sequence: TTA
ggctgtaggatgaattgata

SEQ ID NO: 409466 - DNA, 20 bp, Artificial Sequence
  Description of Artificial Sequence: Synthetic oligonucleotide
  Target: LAMA2; (+) strand; PAM type: YTN; PAM sequence: CTG
taggatgaattgatacaaag

SEQ ID NO: 409467 - DNA, 20 bp, Artificial Sequence
  Description of Artificial Sequence: Synthetic oligonucleotide
  Target: LAMA2; (+) strand; PAM type: YTN; PAM sequence: TTG
atacaaagcgttcatgcaga

SEQ ID NO: 409468 - DNA, 20 bp, Artificial Sequence
  Description of Artificial Sequence: Synthetic oligonucleotide
  Target: LAMA2; (+) strand; PAM type: YTN; PAM sequence: TTC
atgcagaatggctactgaga

SEQ ID NO: 409469 - DNA, 20 bp, Artificial Sequence
  Description of Artificial Sequence: Synthetic oligonucleotide
  Target: LAMA2; (+) strand; PAM type: YTN; PAM sequence: CTA
ctgagacgtttagaaaccat

SEQ ID NO: 409470 - DNA, 20 bp, Artificial Sequence
  Description of Artificial Sequence: Synthetic oligonucleotide
  Target: LAMA2; (+) strand; PAM type: YTN; PAM sequence: CTG
agacgtttagaaaccatgat

SEQ ID NO: 409471 - DNA, 20 bp, Artificial Sequence
  Description of Artificial Sequence: Synthetic oligonucleotide
  Target: LAMA2; (+) strand; PAM type: YTN; PAM sequence: TTT
agaaaccatgatcgagacaa

SEQ ID NO: 409472 - DNA, 20 bp, Artificial Sequence
  Description of Artificial Sequence: Synthetic oligonucleotide
  Target: LAMA2; (+) strand; PAM type: YTN; PAM sequence: TTA
gaaaccatgatcgagacaaa

SEQ ID NO: 409473 - DNA, 20 bp, Artificial Sequence
  Description of Artificial Sequence: Synthetic oligonucleotide
  Target: LAMA2; (+) strand; PAM type: YTN; PAM sequence: TTT
atttggacaaactgagaact

SEQ ID NO: 409474 - DNA, 20 bp, Artificial Sequence
  Description of Artificial Sequence: Synthetic oligonucleotide
  Target: LAMA2; (+) strand; PAM type: YTN; PAM sequence: TTA
tttggacaaactgagaactt

SEQ ID NO: 409475 - DNA, 20 bp, Artificial Sequence
  Description of Artificial Sequence: Synthetic oligonucleotide
  Target: LAMA2; (+) strand; PAM type: YTN; PAM sequence: TTT
ggacaaactgagaactttta

SEQ ID NO: 409476 - DNA, 20 bp, Artificial Sequence
  Description of Artificial Sequence: Synthetic oligonucleotide
  Target: LAMA2; (+) strand; PAM type: YTN; PAM sequence: TTG
gacaaactgagaacttttac

SEQ ID NO: 409477 - DNA, 20 bp, Artificial Sequence
  Description of Artificial Sequence: Synthetic oligonucleotide
  Target: LAMA2; (+) strand; PAM type: YTN; PAM sequence: CTG
agaacttttactaatctaac

SEQ ID NO: 409478 - DNA, 20 bp, Artificial Sequence
  Description of Artificial Sequence: Synthetic oligonucleotide
  Target: LAMA2; (+) strand; PAM type: YTN; PAM sequence: CTT
ttactaatctaacagccaga

SEQ ID NO: 409479 - DNA, 20 bp, Artificial Sequence
  Description of Artificial Sequence: Synthetic oligonucleotide
  Target: LAMA2; (+) strand; PAM type: YTN; PAM sequence: TTT
tactaatctaacagccagat

SEQ ID NO: 409480 - DNA, 20 bp, Artificial Sequence
  Description of Artificial Sequence: Synthetic oligonucleotide
  Target: LAMA2; (+) strand; PAM type: YTN; PAM sequence: TTT
actaatctaacagccagata

SEQ ID NO: 409481 - DNA, 20 bp, Artificial Sequence
  Description of Artificial Sequence: Synthetic oligonucleotide
  Target: LAMA2; (+) strand; PAM type: YTN; PAM sequence: TTA
ctaatctaacagccagatat

SEQ ID NO: 409482 - DNA, 20 bp, Artificial Sequence
  Description of Artificial Sequence: Synthetic oligonucleotide
  Target: LAMA2; (+) strand; PAM type: YTN; PAM sequence: CTA
atctaacagccagatattgt

SEQ ID NO: 409483 - DNA, 20 bp, Artificial Sequence
  Description of Artificial Sequence: Synthetic oligonucleotide
  Target: LAMA2; (+) strand; PAM type: YTN; PAM sequence: CTA
acagccagatattgtagtca

SEQ ID NO: 409484 - DNA, 20 bp, Artificial Sequence
  Description of Artificial Sequence: Synthetic oligonucleotide
  Target: LAMA2; (+) strand; PAM type: YTN; PAM sequence: TTG
tagtcatggtctctgaggag

SEQ ID NO: 409485 - DNA, 20 bp, Artificial Sequence
  Description of Artificial Sequence: Synthetic oligonucleotide
  Target: LAMA2; (+) strand; PAM type: YTN; PAM sequence: CTC
tgaggagaaatgcaaactga

SEQ ID NO: 409486 - DNA, 20 bp, Artificial Sequence
  Description of Artificial Sequence: Synthetic oligonucleotide
  Target: LAMA2; (+) strand; PAM type: YTN; PAM sequence: CTG
aggagaaatgcaaactgaat

SEQ ID NO: 409487 - DNA, 20 bp, Artificial Sequence
  Description of Artificial Sequence: Synthetic oligonucleotide
  Target: LAMA2; (+) strand; PAM type: YTN; PAM sequence: CTG
aatgctctcatttgaatctt

SEQ ID NO: 409488 - DNA, 20 bp, Artificial Sequence
  Description of Artificial Sequence: Synthetic oligonucleotide
  Target: LAMA2; (+) strand; PAM type: YTN; PAM sequence: CTC
tcatttgaatcttagaatgc

SEQ ID NO: 409489 - DNA, 20 bp, Artificial Sequence
  Description of Artificial Sequence: Synthetic oligonucleotide
  Target: LAMA2; (+) strand; PAM type: YTN; PAM sequence: CTC
atttgaatcttagaatgctt

SEQ ID NO: 409490 - DNA, 20 bp, Artificial Sequence
  Description of Artificial Sequence: Synthetic oligonucleotide
  Target: LAMA2; (+) strand; PAM type: YTN; PAM sequence: TTT
gaatcttagaatgctttaga

SEQ ID NO: 409491 - DNA, 20 bp, Artificial Sequence
  Description of Artificial Sequence: Synthetic oligonucleotide
  Target: LAMA2; (+) strand; PAM type: YTN; PAM sequence: TTG
aatcttagaatgctttagaa

SEQ ID NO: 409492 - DNA, 20 bp, Artificial Sequence
  Description of Artificial Sequence: Synthetic oligonucleotide
  Target: LAMA2; (+) strand; PAM type: YTN; PAM sequence: CTT
agaatgctttagaatcctgg

SEQ ID NO: 409493 - DNA, 20 bp, Artificial Sequence
  Description of Artificial Sequence: Synthetic oligonucleotide
  Target: LAMA2; (+) strand; PAM type: YTN; PAM sequence: TTA
gaatgctttagaatcctggt

SEQ ID NO: 409494 - DNA, 20 bp, Artificial Sequence
  Description of Artificial Sequence: Synthetic oligonucleotide
  Target: LAMA2; (+) strand; PAM type: YTN; PAM sequence: CTT
tagaatcctggtttcacatg

SEQ ID NO: 409495 - DNA, 20 bp, Artificial Sequence
  Description of Artificial Sequence: Synthetic oligonucleotide
  Target: LAMA2; (+) strand; PAM type: YTN; PAM sequence: TTT
agaatcctggtttcacatgt

SEQ ID NO: 409496 - DNA, 20 bp, Artificial Sequence
  Description of Artificial Sequence: Synthetic oligonucleotide
  Target: LAMA2; (+) strand; PAM type: YTN; PAM sequence: TTA
gaatcctggtttcacatgtc

SEQ ID NO: 409497 - DNA, 20 bp, Artificial Sequence
  Description of Artificial Sequence: Synthetic oligonucleotide
  Target: LAMA2; (+) strand; PAM type: YTN; PAM sequence: CTG
gtttcacatgtcttctagat

SEQ ID NO: 409498 - DNA, 20 bp, Artificial Sequence
  Description of Artificial Sequence: Synthetic oligonucleotide
  Target: LAMA2; (+) strand; PAM type: YTN; PAM sequence: TTT
cacatgtcttctagattaga

SEQ ID NO: 409499 - DNA, 20 bp, Artificial Sequence
  Description of Artificial Sequence: Synthetic oligonucleotide
  Target: LAMA2; (+) strand; PAM type: YTN; PAM sequence: TTC
acatgtcttctagattagat

SEQ ID NO: 409500 - DNA, 20 bp, Artificial Sequence
  Description of Artificial Sequence: Synthetic oligonucleotide
  Target: LAMA2; (+) strand; PAM type: YTN; PAM sequence: CTT
ctagattagatgttaggccc

SEQ ID NO: 409501 - DNA, 20 bp, Artificial Sequence
  Description of Artificial Sequence: Synthetic oligonucleotide
  Target: LAMA2; (+) strand; PAM type: YTN; PAM sequence: TTC
tagattagatgttaggccct

SEQ ID NO: 409502 - DNA, 20 bp, Artificial Sequence
  Description of Artificial Sequence: Synthetic oligonucleotide
  Target: LAMA2; (+) strand; PAM type: YTN; PAM sequence: CTA
gattagatgttaggcccttt

SEQ ID NO: 409503 - DNA, 20 bp, Artificial Sequence
  Description of Artificial Sequence: Synthetic oligonucleotide
  Target: LAMA2; (+) strand; PAM type: YTN; PAM sequence: TTA
gatgttaggccctttgacaa

SEQ ID NO: 409504 - DNA, 20 bp, Artificial Sequence
  Description of Artificial Sequence: Synthetic oligonucleotide
  Target: LAMA2; (+) strand; PAM type: YTN; PAM sequence: TTA
ggccctttgacaaactttaa

SEQ ID NO: 409505 - DNA, 20 bp, Artificial Sequence
  Description of Artificial Sequence: Synthetic oligonucleotide
  Target: LAMA2; (+) strand; PAM type: YTN; PAM sequence: CTT
tgacaaactttaatcctttt

SEQ ID NO: 409506 - DNA, 20 bp, Artificial Sequence
  Description of Artificial Sequence: Synthetic oligonucleotide
  Target: LAMA2; (+) strand; PAM type: YTN; PAM sequence: TTT
gacaaactttaatccttttc

SEQ ID NO: 409507 - DNA, 20 bp, Artificial Sequence
  Description of Artificial Sequence: Synthetic oligonucleotide
  Target: LAMA2; (+) strand; PAM type: YTN; PAM sequence: TTG
acaaactttaatccttttca

SEQ ID NO: 409508 - DNA, 20 bp, Artificial Sequence
  Description of Artificial Sequence: Synthetic oligonucleotide
  Target: LAMA2; (+) strand; PAM type: YTN; PAM sequence: CTT
taatccttttcattgcggaa

SEQ ID NO: 409509 - DNA, 20 bp, Artificial Sequence
  Description of Artificial Sequence: Synthetic oligonucleotide
  Target: LAMA2; (+) strand; PAM type: YTN; PAM sequence: TTT
aatccttttcattgcggaaa

SEQ ID NO: 409510 - DNA, 20 bp, Artificial Sequence
  Description of Artificial Sequence: Synthetic oligonucleotide
  Target: LAMA2; (+) strand; PAM type: YTN; PAM sequence: TTA
atccttttcattgcggaaag

SEQ ID NO: 409511 - DNA, 20 bp, Artificial Sequence
  Description of Artificial Sequence: Synthetic oligonucleotide
  Target: LAMA2; (+) strand; PAM type: YTN; PAM sequence: CTT
ttcattgcggaaaggacttt

SEQ ID NO: 409512 - DNA, 20 bp, Artificial Sequence
  Description of Artificial Sequence: Synthetic oligonucleotide
  Target: LAMA2; (+) strand; PAM type: YTN; PAM sequence: TTT
tcattgcggaaaggactttt

SEQ ID NO: 409513 - DNA, 20 bp, Artificial Sequence
  Description of Artificial Sequence: Synthetic oligonucleotide
  Target: LAMA2; (+) strand; PAM type: YTN; PAM sequence: TTT
cattgcggaaaggacttttt

SEQ ID NO: 409514 - DNA, 20 bp, Artificial Sequence
  Description of Artificial Sequence: Synthetic oligonucleotide
  Target: LAMA2; (+) strand; PAM type: YTN; PAM sequence: TTC
attgcggaaaggacttttta

SEQ ID NO: 409515 - DNA, 20 bp, Artificial Sequence
  Description of Artificial Sequence: Synthetic oligonucleotide
  Target: LAMA2; (+) strand; PAM type: YTN; PAM sequence: TTG
cggaaaggactttttaaaag

SEQ ID NO: 409516 - DNA, 20 bp, Artificial Sequence
  Description of Artificial Sequence: Synthetic oligonucleotide
  Target: LAMA2; (+) strand; PAM type: YTN; PAM sequence: CTT
tttaaaagatttaaacttta

SEQ ID NO: 409517 - DNA, 20 bp, Artificial Sequence
  Description of Artificial Sequence: Synthetic oligonucleotide
  Target: LAMA2; (+) strand; PAM type: YTN; PAM sequence: TTT
ttaaaagatttaaactttag

SEQ ID NO: 409518 - DNA, 20 bp, Artificial Sequence
  Description of Artificial Sequence: Synthetic oligonucleotide
  Target: LAMA2; (+) strand; PAM type: YTN; PAM sequence: TTT
taaaagatttaaactttagc

SEQ ID NO: 409519 - DNA, 20 bp, Artificial Sequence
  Description of Artificial Sequence: Synthetic oligonucleotide
  Target: LAMA2; (+) strand; PAM type: YTN; PAM sequence: TTT
aaaagatttaaactttagcc

SEQ ID NO: 409520 - DNA, 20 bp, Artificial Sequence
  Description of Artificial Sequence: Synthetic oligonucleotide
  Target: LAMA2; (+) strand; PAM type: YTN; PAM sequence: TTA
aaagatttaaactttagccg

SEQ ID NO: 409521 - DNA, 20 bp, Artificial Sequence
  Description of Artificial Sequence: Synthetic oligonucleotide
  Target: LAMA2; (+) strand; PAM type: YTN; PAM sequence: TTT
aaactttagccgggcgtggt

SEQ ID NO: 409522 - DNA, 20 bp, Artificial Sequence
  Description of Artificial Sequence: Synthetic oligonucleotide
  Target: LAMA2; (+) strand; PAM type: YTN; PAM sequence: TTA
aactttagccgggcgtggtg

SEQ ID NO: 409523 - DNA, 20 bp, Artificial Sequence
  Description of Artificial Sequence: Synthetic oligonucleotide
  Target: LAMA2; (+) strand; PAM type: YTN; PAM sequence: CTT
tagccgggcgtggtggctca

SEQ ID NO: 409524 - DNA, 20 bp, Artificial Sequence
  Description of Artificial Sequence: Synthetic oligonucleotide
  Target: LAMA2; (+) strand; PAM type: YTN; PAM sequence: TTT
agccgggcgtggtggctcac

SEQ ID NO: 409525 - DNA, 20 bp, Artificial Sequence
  Description of Artificial Sequence: Synthetic oligonucleotide
  Target: LAMA2; (+) strand; PAM type: YTN; PAM sequence: TTA
gccgggcgtggtggctcaca

SEQ ID NO: 409526 - DNA, 20 bp, Artificial Sequence
  Description of Artificial Sequence: Synthetic oligonucleotide
  Target: LAMA2; (+) strand; PAM type: YTN; PAM sequence: CTC
acacctgtaatcccagcact

SEQ ID NO: 409527 - DNA, 20 bp, Artificial Sequence
  Description of Artificial Sequence: Synthetic oligonucleotide
  Target: LAMA2; (+) strand; PAM type: YTN; PAM sequence: CTG
taatcccagcactttgggag

SEQ ID NO: 409528 - DNA, 20 bp, Artificial Sequence
  Description of Artificial Sequence: Synthetic oligonucleotide
  Target: LAMA2; (+) strand; PAM type: YTN; PAM sequence: CTT
tgggaggccaaggcaggtgg

SEQ ID NO: 409529 - DNA, 20 bp, Artificial Sequence
  Description of Artificial Sequence: Synthetic oligonucleotide
  Target: LAMA2; (+) strand; PAM type: YTN; PAM sequence: TTT
gggaggccaaggcaggtgga

SEQ ID NO: 409530 - DNA, 20 bp, Artificial Sequence
  Description of Artificial Sequence: Synthetic oligonucleotide
  Target: LAMA2; (+) strand; PAM type: YTN; PAM sequence: TTG
ggaggccaaggcaggtggat

SEQ ID NO: 409531 - DNA, 20 bp, Artificial Sequence
  Description of Artificial Sequence: Synthetic oligonucleotide
  Target: LAMA2; (+) strand; PAM type: YTN; PAM sequence: TTC
gagaccagcctggccaatat

SEQ ID NO: 409532 - DNA, 20 bp, Artificial Sequence
  Description of Artificial Sequence: Synthetic oligonucleotide
  Target: LAMA2; (+) strand; PAM type: YTN; PAM sequence: CTG
gccaatatggtgaaaccccg

SEQ ID NO: 409533 - DNA, 20 bp, Artificial Sequence
  Description of Artificial Sequence: Synthetic oligonucleotide
  Target: LAMA2; (+) strand; PAM type: YTN; PAM sequence: CTC
tactaaaaatgcaaaaacat

SEQ ID NO: 409534 - DNA, 20 bp, Artificial Sequence
  Description of Artificial Sequence: Synthetic oligonucleotide
  Target: LAMA2; (+) strand; PAM type: YTN; PAM sequence: CTA
ctaaaaatgcaaaaacatta

SEQ ID NO: 409535 - DNA, 20 bp, Artificial Sequence
  Description of Artificial Sequence: Synthetic oligonucleotide
  Target: LAMA2; (+) strand; PAM type: YTN; PAM sequence: CTA
aaaatgcaaaaacattagcc

SEQ ID NO: 409536 - DNA, 20 bp, Artificial Sequence
  Description of Artificial Sequence: Synthetic oligonucleotide
  Target: LAMA2; (+) strand; PAM type: YTN; PAM sequence: TTA
gccagacatggtggtaggcg

SEQ ID NO: 409537 - DNA, 20 bp, Artificial Sequence
  Description of Artificial Sequence: Synthetic oligonucleotide
  Target: LAMA2; (+) strand; PAM type: YTN; PAM sequence: CTG
taatcacagctactctggag

SEQ ID NO: 409538 - DNA, 20 bp, Artificial Sequence
  Description of Artificial Sequence: Synthetic oligonucleotide
  Target: LAMA2; (+) strand; PAM type: YTN; PAM sequence: CTA
ctctggaggctgaggcagga

SEQ ID NO: 409539 - DNA, 20 bp, Artificial Sequence
  Description of Artificial Sequence: Synthetic oligonucleotide
  Target: LAMA2; (+) strand; PAM type: YTN; PAM sequence: CTC
tggaggctgaggcaggagaa

SEQ ID NO: 409540 - DNA, 20 bp, Artificial Sequence
  Description of Artificial Sequence: Synthetic oligonucleotide
  Target: LAMA2; (+) strand; PAM type: YTN; PAM sequence: CTG
gaggctgaggcaggagaaat

SEQ ID NO: 409541 - DNA, 20 bp, Artificial Sequence
  Description of Artificial Sequence: Synthetic oligonucleotide
  Target: LAMA2; (+) strand; PAM type: YTN; PAM sequence: CTG
aggcaggagaaatgcttaaa

SEQ ID NO: 409542 - DNA, 20 bp, Artificial Sequence
  Description of Artificial Sequence: Synthetic oligonucleotide
  Target: LAMA2; (+) strand; PAM type: YTN; PAM sequence: CTT
aaaccagggggacagaggtt

SEQ ID NO: 409543 - DNA, 20 bp, Artificial Sequence
  Description of Artificial Sequence: Synthetic oligonucleotide
  Target: LAMA2; (+) strand; PAM type: YTN; PAM sequence: TTA
aaccagggggacagaggttt

SEQ ID NO: 409544 - DNA, 20 bp, Artificial Sequence
  Description of Artificial Sequence: Synthetic oligonucleotide
  Target: LAMA2; (+) strand; PAM type: YTN; PAM sequence: TTT
cagtgagccgagatcgcacc

SEQ ID NO: 409545 - DNA, 20 bp, Artificial Sequence
  Description of Artificial Sequence: Synthetic oligonucleotide
  Target: LAMA2; (+) strand; PAM type: YTN; PAM sequence: TTC
agtgagccgagatcgcacca

SEQ ID NO: 409546 - DNA, 20 bp, Artificial Sequence
  Description of Artificial Sequence: Synthetic oligonucleotide
  Target: LAMA2; (+) strand; PAM type: YTN; PAM sequence: CTG
cactccagcctgggcaacag

SEQ ID NO: 409547 - DNA, 20 bp, Artificial Sequence
  Description of Artificial Sequence: Synthetic oligonucleotide
  Target: LAMA2; (+) strand; PAM type: YTN; PAM sequence: CTC
cagcctgggcaacagagcaa

SEQ ID NO: 409548 - DNA, 20 bp, Artificial Sequence
  Description of Artificial Sequence: Synthetic oligonucleotide
  Target: LAMA2; (+) strand; PAM type: YTN; PAM sequence: CTG
ggcaacagagcaagactcca

SEQ ID NO: 409549 - DNA, 20 bp, Artificial Sequence
  Description of Artificial Sequence: Synthetic oligonucleotide
  Target: LAMA2; (+) strand; PAM type: YTN; PAM sequence: CTC
caactcggaaaaaacaaaac

SEQ ID NO: 409550 - DNA, 20 bp, Artificial Sequence
  Description of Artificial Sequence: Synthetic oligonucleotide
  Target: LAMA2; (+) strand; PAM type: YTN; PAM sequence: CTC
ggaaaaaacaaaacaaaaca

SEQ ID NO: 409551 - DNA, 20 bp, Artificial Sequence
  Description of Artificial Sequence: Synthetic oligonucleotide
  Target: LAMA2; (+) strand; PAM type: YTN; PAM sequence: TTT
aaactttaaggaatttcaat

SEQ ID NO: 409552 - DNA, 20 bp, Artificial Sequence
  Description of Artificial Sequence: Synthetic oligonucleotide
  Target: LAMA2; (+) strand; PAM type: YTN; PAM sequence: TTA
aactttaaggaatttcaata

SEQ ID NO: 409553 - DNA, 20 bp, Artificial Sequence
  Description of Artificial Sequence: Synthetic oligonucleotide
  Target: LAMA2; (+) strand; PAM type: YTN; PAM sequence: CTT
taaggaatttcaataagtaa

SEQ ID NO: 409554 - DNA, 20 bp, Artificial Sequence
  Description of Artificial Sequence: Synthetic oligonucleotide
  Target: LAMA2; (+) strand; PAM type: YTN; PAM sequence: TTT
aaggaatttcaataagtaac

SEQ ID NO: 409555 - DNA, 20 bp, Artificial Sequence
  Description of Artificial Sequence: Synthetic oligonucleotide
  Target: LAMA2; (+) strand; PAM type: YTN; PAM sequence: TTA
aggaatttcaataagtaact

SEQ ID NO: 409556 - DNA, 20 bp, Artificial Sequence
  Description of Artificial Sequence: Synthetic oligonucleotide
  Target: LAMA2; (+) strand; PAM type: YTN; PAM sequence: TTT
caataagtaactgcagattt

SEQ ID NO: 409557 - DNA, 20 bp, Artificial Sequence
  Description of Artificial Sequence: Synthetic oligonucleotide
  Target: LAMA2; (+) strand; PAM type: YTN; PAM sequence: TTC
aataagtaactgcagatttg

SEQ ID NO: 409558 - DNA, 20 bp, Artificial Sequence
  Description of Artificial Sequence: Synthetic oligonucleotide
  Target: LAMA2; (+) strand; PAM type: YTN; PAM sequence: CTG
cagatttgagaaattagttt

SEQ ID NO: 409559 - DNA, 20 bp, Artificial Sequence
  Description of Artificial Sequence: Synthetic oligonucleotide
  Target: LAMA2; (+) strand; PAM type: YTN; PAM sequence: TTT
gagaaattagtttaccgaaa

SEQ ID NO: 409560 - DNA, 20 bp, Artificial Sequence
  Description of Artificial Sequence: Synthetic oligonucleotide
  Target: LAMA2; (+) strand; PAM type: YTN; PAM sequence: TTG
agaaattagtttaccgaaat

SEQ ID NO: 409561 - DNA, 20 bp, Artificial Sequence
  Description of Artificial Sequence: Synthetic oligonucleotide
  Target: LAMA2; (+) strand; PAM type: YTN; PAM sequence: TTA
gtttaccgaaatcactcaaa

SEQ ID NO: 409562 - DNA, 20 bp, Artificial Sequence
  Description of Artificial Sequence: Synthetic oligonucleotide
  Target: LAMA2; (+) strand; PAM type: YTN; PAM sequence: TTT
accgaaatcactcaaaatgt

SEQ ID NO: 409563 - DNA, 20 bp, Artificial Sequence
  Description of Artificial Sequence: Synthetic oligonucleotide
  Target: LAMA2; (+) strand; PAM type: YTN; PAM sequence: TTA
ccgaaatcactcaaaatgtg

SEQ ID NO: 409564 - DNA, 20 bp, Artificial Sequence
  Description of Artificial Sequence: Synthetic oligonucleotide
  Target: LAMA2; (+) strand; PAM type: YTN; PAM sequence: CTC
aaaatgtgttattttgttga

SEQ ID NO: 409565 - DNA, 20 bp, Artificial Sequence
  Description of Artificial Sequence: Synthetic oligonucleotide
  Target: LAMA2; (+) strand; PAM type: YTN; PAM sequence: TTA
ttttgttgagaaagaattct

SEQ ID NO: 409566 - DNA, 20 bp, Artificial Sequence
  Description of Artificial Sequence: Synthetic oligonucleotide
  Target: LAMA2; (+) strand; PAM type: YTN; PAM sequence: TTT
tgttgagaaagaattctgga

SEQ ID NO: 409567 - DNA, 20 bp, Artificial Sequence
  Description of Artificial Sequence: Synthetic oligonucleotide
  Target: LAMA2; (+) strand; PAM type: YTN; PAM sequence: TTT
gttgagaaagaattctggaa

SEQ ID NO: 409568 - DNA, 20 bp, Artificial Sequence
  Description of Artificial Sequence: Synthetic oligonucleotide
  Target: LAMA2; (+) strand; PAM type: YTN; PAM sequence: TTG
ttgagaaagaattctggaat

SEQ ID NO: 409569 - DNA, 20 bp, Artificial Sequence
  Description of Artificial Sequence: Synthetic oligonucleotide
  Target: LAMA2; (+) strand; PAM type: YTN; PAM sequence: TTG
agaaagaattctggaattcc

SEQ ID NO: 409570 - DNA, 20 bp, Artificial Sequence
  Description of Artificial Sequence: Synthetic oligonucleotide
  Target: LAMA2; (+) strand; PAM type: YTN; PAM sequence: TTC
tggaattcccaaatgcatta

SEQ ID NO: 409571 - DNA, 20 bp, Artificial Sequence
  Description of Artificial Sequence: Synthetic oligonucleotide
  Target: LAMA2; (+) strand; PAM type: YTN; PAM sequence: CTG
gaattcccaaatgcattaca

SEQ ID NO: 409572 - DNA, 20 bp, Artificial Sequence
  Description of Artificial Sequence: Synthetic oligonucleotide
  Target: LAMA2; (+) strand; PAM type: YTN; PAM sequence: TTC
ccaaatgcattacactattg

SEQ ID NO: 409573 - DNA, 20 bp, Artificial Sequence
  Description of Artificial Sequence: Synthetic oligonucleotide
  Target: LAMA2; (+) strand; PAM type: YTN; PAM sequence: TTA
cactattgtaccactatgcc

SEQ ID NO: 409574 - DNA, 20 bp, Artificial Sequence
  Description of Artificial Sequence: Synthetic oligonucleotide
  Target: LAMA2; (+) strand; PAM type: YTN; PAM sequence: CTA
ttgtaccactatgccactat

SEQ ID NO: 409575 - DNA, 20 bp, Artificial Sequence
  Description of Artificial Sequence: Synthetic oligonucleotide
  Target: LAMA2; (+) strand; PAM type: YTN; PAM sequence: TTG
taccactatgccactatgtc

SEQ ID NO: 409576 - DNA, 20 bp, Artificial Sequence
  Description of Artificial Sequence: Synthetic oligonucleotide
  Target: LAMA2; (+) strand; PAM type: YTN; PAM sequence: CTA
tgccactatgtccttttaac

SEQ ID NO: 409577 - DNA, 20 bp, Artificial Sequence
  Description of Artificial Sequence: Synthetic oligonucleotide
  Target: LAMA2; (+) strand; PAM type: YTN; PAM sequence: CTA
tgtccttttaacaggtgctt

SEQ ID NO: 409578 - DNA, 20 bp, Artificial Sequence
  Description of Artificial Sequence: Synthetic oligonucleotide
  Target: LAMA2; (+) strand; PAM type: YTN; PAM sequence: CTT
ttaacaggtgcttcttcaag

SEQ ID NO: 409579 - DNA, 20 bp, Artificial Sequence
  Description of Artificial Sequence: Synthetic oligonucleotide
  Target: LAMA2; (+) strand; PAM type: YTN; PAM sequence: TTT
taacaggtgcttcttcaaga

SEQ ID NO: 409580 - DNA, 20 bp, Artificial Sequence
  Description of Artificial Sequence: Synthetic oligonucleotide
  Target: LAMA2; (+) strand; PAM type: YTN; PAM sequence: TTT
aacaggtgcttcttcaagaa

SEQ ID NO: 409581 - DNA, 20 bp, Artificial Sequence
  Description of Artificial Sequence: Synthetic oligonucleotide
  Target: LAMA2; (+) strand; PAM type: YTN; PAM sequence: TTA
acaggtgcttcttcaagaag

SEQ ID NO: 409582 - DNA, 20 bp, Artificial Sequence
  Description of Artificial Sequence: Synthetic oligonucleotide
  Target: LAMA2; (+) strand; PAM type: YTN; PAM sequence: CTT
cttcaagaagggcattttat

SEQ ID NO: 409583 - DNA, 20 bp, Artificial Sequence
  Description of Artificial Sequence: Synthetic oligonucleotide
  Target: LAMA2; (+) strand; PAM type: YTN; PAM sequence: TTC
ttcaagaagggcattttatt

SEQ ID NO: 409584 - DNA, 20 bp, Artificial Sequence
  Description of Artificial Sequence: Synthetic oligonucleotide
  Target: LAMA2; (+) strand; PAM type: YTN; PAM sequence: CTT
caagaagggcattttattat

SEQ ID NO: 409585 - DNA, 20 bp, Artificial Sequence
  Description of Artificial Sequence: Synthetic oligonucleotide
  Target: LAMA2; (+) strand; PAM type: YTN; PAM sequence: TTC
aagaagggcattttattatg

SEQ ID NO: 409586 - DNA, 20 bp, Artificial Sequence
  Description of Artificial Sequence: Synthetic oligonucleotide
  Target: LAMA2; (+) strand; PAM type: YTN; PAM sequence: TTT
tattatgccaacttcacagc

SEQ ID NO: 409587 - DNA, 20 bp, Artificial Sequence
  Description of Artificial Sequence: Synthetic oligonucleotide
  Target: LAMA2; (+) strand; PAM type: YTN; PAM sequence: TTT
attatgccaacttcacagct

SEQ ID NO: 409588 - DNA, 20 bp, Artificial Sequence
  Description of Artificial Sequence: Synthetic oligonucleotide
  Target: LAMA2; (+) strand; PAM type: YTN; PAM sequence: TTA
ttatgccaacttcacagctg

SEQ ID NO: 409589 - DNA, 20 bp, Artificial Sequence
  Description of Artificial Sequence: Synthetic oligonucleotide
  Target: LAMA2; (+) strand; PAM type: YTN; PAM sequence: TTA
tgccaacttcacagctgttg

SEQ ID NO: 409590 - DNA, 20 bp, Artificial Sequence
  Description of Artificial Sequence: Synthetic oligonucleotide
  Target: LAMA2; (+) strand; PAM type: YTN; PAM sequence: CTT
cacagctgttgaccatcaat

SEQ ID NO: 409591 - DNA, 20 bp, Artificial Sequence
  Description of Artificial Sequence: Synthetic oligonucleotide
  Target: LAMA2; (+) strand; PAM type: YTN; PAM sequence: TTC
acagctgttgaccatcaatc

SEQ ID NO: 409592 - DNA, 20 bp, Artificial Sequence
  Description of Artificial Sequence: Synthetic oligonucleotide
  Target: LAMA2; (+) strand; PAM type: YTN; PAM sequence: CTG
ttgaccatcaatccaacctt

SEQ ID NO: 409593 - DNA, 20 bp, Artificial Sequence
  Description of Artificial Sequence: Synthetic oligonucleotide
  Target: LAMA2; (+) strand; PAM type: YTN; PAM sequence: TTG
accatcaatccaacctttat

SEQ ID NO: 409594 - DNA, 20 bp, Artificial Sequence
  Description of Artificial Sequence: Synthetic oligonucleotide
  Target: LAMA2; (+) strand; PAM type: YTN; PAM sequence: CTT
tatttgattaagctcagtat

SEQ ID NO: 409595 - DNA, 20 bp, Artificial Sequence
  Description of Artificial Sequence: Synthetic oligonucleotide
  Target: LAMA2; (+) strand; PAM type: YTN; PAM sequence: TTT
atttgattaagctcagtata

SEQ ID NO: 409596 - DNA, 20 bp, Artificial Sequence
  Description of Artificial Sequence: Synthetic oligonucleotide
  Target: LAMA2; (+) strand; PAM type: YTN; PAM sequence: TTA
tttgattaagctcagtatat

SEQ ID NO: 409597 - DNA, 20 bp, Artificial Sequence
  Description of Artificial Sequence: Synthetic oligonucleotide
  Target: LAMA2; (+) strand; PAM type: YTN; PAM sequence: TTT
gattaagctcagtatatagt

SEQ ID NO: 409598 - DNA, 20 bp, Artificial Sequence
  Description of Artificial Sequence: Synthetic oligonucleotide
  Target: LAMA2; (+) strand; PAM type: YTN; PAM sequence: TTG
attaagctcagtatatagta

SEQ ID NO: 409599 - DNA, 20 bp, Artificial Sequence
  Description of Artificial Sequence: Synthetic oligonucleotide
  Target: LAMA2; (+) strand; PAM type: YTN; PAM sequence: TTA
agctcagtatatagtacatc

SEQ ID NO: 409600 - DNA, 20 bp, Artificial Sequence
  Description of Artificial Sequence: Synthetic oligonucleotide
  Target: LAMA2; (+) strand; PAM type: YTN; PAM sequence: CTC
agtatatagtacatcactgg

SEQ ID NO: 409601 - DNA, 20 bp, Artificial Sequence
  Description of Artificial Sequence: Synthetic oligonucleotide
  Target: LAMA2; (+) strand; PAM type: YTN; PAM sequence: CTG
gaaaccagtcatttagttaa

SEQ ID NO: 409602 - DNA, 20 bp, Artificial Sequence
  Description of Artificial Sequence: Synthetic oligonucleotide
  Target: LAMA2; (+) strand; PAM type: YTN; PAM sequence: TTT
agttaattggccatataaac

SEQ ID NO: 409603 - DNA, 20 bp, Artificial Sequence
  Description of Artificial Sequence: Synthetic oligonucleotide
  Target: LAMA2; (+) strand; PAM type: YTN; PAM sequence: TTA
gttaattggccatataaacg

SEQ ID NO: 409604 - DNA, 20 bp, Artificial Sequence
  Description of Artificial Sequence: Synthetic oligonucleotide
  Target: LAMA2; (+) strand; PAM type: YTN; PAM sequence: TTA
attggccatataaacgaaca

SEQ ID NO: 409605 - DNA, 20 bp, Artificial Sequence
  Description of Artificial Sequence: Synthetic oligonucleotide
  Target: LAMA2; (+) strand; PAM type: YTN; PAM sequence: TTG
gccatataaacgaacagttt

SEQ ID NO: 409606 - DNA, 20 bp, Artificial Sequence
  Description of Artificial Sequence: Synthetic oligonucleotide
  Target: LAMA2; (+) strand; PAM type: YTN; PAM sequence: TTT
tgccattcattgttaattac

SEQ ID NO: 409607 - DNA, 20 bp, Artificial Sequence
  Description of Artificial Sequence: Synthetic oligonucleotide
  Target: LAMA2; (+) strand; PAM type: YTN; PAM sequence: TTT
gccattcattgttaattaca

SEQ ID NO: 409608 - DNA, 20 bp, Artificial Sequence
  Description of Artificial Sequence: Synthetic oligonucleotide
  Target: LAMA2; (+) strand; PAM type: YTN; PAM sequence: TTG
ccattcattgttaattacag

SEQ ID NO: 409609 - DNA, 20 bp, Artificial Sequence
  Description of Artificial Sequence: Synthetic oligonucleotide
  Target: LAMA2; (+) strand; PAM type: YTN; PAM sequence: TTC
attgttaattacaggataat

SEQ ID NO: 409610 - DNA, 20 bp, Artificial Sequence
  Description of Artificial Sequence: Synthetic oligonucleotide
  Target: LAMA2; (+) strand; PAM type: YTN; PAM sequence: TTG
ttaattacaggataatatat

SEQ ID NO: 409611 - DNA, 20 bp, Artificial Sequence
  Description of Artificial Sequence: Synthetic oligonucleotide
  Target: LAMA2; (+) strand; PAM type: YTN; PAM sequence: TTA
attacaggataatatatgac

SEQ ID NO: 409612 - DNA, 20 bp, Artificial Sequence
  Description of Artificial Sequence: Synthetic oligonucleotide
  Target: LAMA2; (+) strand; PAM type: YTN; PAM sequence: TTA
caggataatatatgacatat

SEQ ID NO: 409613 - DNA, 20 bp, Artificial Sequence
  Description of Artificial Sequence: Synthetic oligonucleotide
  Target: LAMA2; (+) strand; PAM type: YTN; PAM sequence: TTA
gtgtgtagtcactgaactct

SEQ ID NO: 409614 - DNA, 20 bp, Artificial Sequence
  Description of Artificial Sequence: Synthetic oligonucleotide
  Target: LAMA2; (+) strand; PAM type: YTN; PAM sequence: CTG
aactctgtgccaaaacagta

SEQ ID NO: 409615 - DNA, 20 bp, Artificial Sequence
  Description of Artificial Sequence: Synthetic oligonucleotide
  Target: LAMA2; (+) strand; PAM type: YTN; PAM sequence: CTC
tgtgccaaaacagtaataca

SEQ ID NO: 409616 - DNA, 20 bp, Artificial Sequence
  Description of Artificial Sequence: Synthetic oligonucleotide
  Target: LAMA2; (+) strand; PAM type: YTN; PAM sequence: CTG
tgccaaaacagtaatacatt

SEQ ID NO: 409617 - DNA, 20 bp, Artificial Sequence
  Description of Artificial Sequence: Synthetic oligonucleotide
  Target: LAMA2; (+) strand; PAM type: YTN; PAM sequence: TTT
gctaccataatggctcattc

SEQ ID NO: 409618 - DNA, 20 bp, Artificial Sequence
  Description of Artificial Sequence: Synthetic oligonucleotide
  Target: LAMA2; (+) strand; PAM type: YTN; PAM sequence: TTG
ctaccataatggctcattcg

SEQ ID NO: 409619 - DNA, 20 bp, Artificial Sequence
  Description of Artificial Sequence: Synthetic oligonucleotide
  Target: LAMA2; (+) strand; PAM type: YTN; PAM sequence: CTA
ccataatggctcattcggca

SEQ ID NO: 409620 - DNA, 20 bp, Artificial Sequence
  Description of Artificial Sequence: Synthetic oligonucleotide
  Target: LAMA2; (+) strand; PAM type: YTN; PAM sequence: CTC
attcggcactctaaggttaa

SEQ ID NO: 409621 - DNA, 20 bp, Artificial Sequence
  Description of Artificial Sequence: Synthetic oligonucleotide
  Target: LAMA2; (+) strand; PAM type: YTN; PAM sequence: TTC
ggcactctaaggttaaaatg

SEQ ID NO: 409622 - DNA, 20 bp, Artificial Sequence
  Description of Artificial Sequence: Synthetic oligonucleotide
  Target: LAMA2; (+) strand; PAM type: YTN; PAM sequence: CTC
taaggttaaaatgcaatcta

SEQ ID NO: 409623 - DNA, 20 bp, Artificial Sequence
  Description of Artificial Sequence: Synthetic oligonucleotide
  Target: LAMA2; (+) strand; PAM type: YTN; PAM sequence: CTA
aggttaaaatgcaatctact

SEQ ID NO: 409624 - DNA, 20 bp, Artificial Sequence
  Description of Artificial Sequence: Synthetic oligonucleotide
  Target: LAMA2; (+) strand; PAM type: YTN; PAM sequence: TTA
aaatgcaatctactctataa

SEQ ID NO: 409625 - DNA, 20 bp, Artificial Sequence
  Description of Artificial Sequence: Synthetic oligonucleotide
  Target: LAMA2; (+) strand; PAM type: YTN; PAM sequence: CTA
ctctataagcaagtgccaca

SEQ ID NO: 409626 - DNA, 20 bp, Artificial Sequence
  Description of Artificial Sequence: Synthetic oligonucleotide
  Target: LAMA2; (+) strand; PAM type: YTN; PAM sequence: CTC
tataagcaagtgccacatta

SEQ ID NO: 409627 - DNA, 20 bp, Artificial Sequence
  Description of Artificial Sequence: Synthetic oligonucleotide
  Target: LAMA2; (+) strand; PAM type: YTN; PAM sequence: CTA
taagcaagtgccacattaaa

SEQ ID NO: 409628 - DNA, 20 bp, Artificial Sequence
  Description of Artificial Sequence: Synthetic oligonucleotide
  Target: LAMA2; (+) strand; PAM type: YTN; PAM sequence: TTA
aactgattgaccagagatcg

SEQ ID NO: 409629 - DNA, 20 bp, Artificial Sequence
  Description of Artificial Sequence: Synthetic oligonucleotide
  Target: LAMA2; (+) strand; PAM type: YTN; PAM sequence: CTG
attgaccagagatcgcaagt

SEQ ID NO: 409630 - DNA, 20 bp, Artificial Sequence
  Description of Artificial Sequence: Synthetic oligonucleotide
  Target: LAMA2; (+) strand; PAM type: YTN; PAM sequence: TTG
accagagatcgcaagtgacc

SEQ ID NO: 409631 - DNA, 20 bp, Artificial Sequence
  Description of Artificial Sequence: Synthetic oligonucleotide
  Target: LAMA2; (+) strand; PAM type: YTN; PAM sequence: CTT
cacccagaaaaaatttttaa

SEQ ID NO: 409632 - DNA, 20 bp, Artificial Sequence
  Description of Artificial Sequence: Synthetic oligonucleotide
  Target: LAMA2; (+) strand; PAM type: YTN; PAM sequence: TTC
acccagaaaaaatttttaat

SEQ ID NO: 409633 - DNA, 20 bp, Artificial Sequence
  Description of Artificial Sequence: Synthetic oligonucleotide
  Target: LAMA2; (+) strand; PAM type: YTN; PAM sequence: TTT
ttaatgctttatatgcctat

SEQ ID NO: 409634 - DNA, 20 bp, Artificial Sequence
  Description of Artificial Sequence: Synthetic oligonucleotide
  Target: LAMA2; (+) strand; PAM type: YTN; PAM sequence: TTT
taatgctttatatgcctatt

SEQ ID NO: 409635 - DNA, 20 bp, Artificial Sequence
  Description of Artificial Sequence: Synthetic oligonucleotide
  Target: LAMA2; (+) strand; PAM type: YTN; PAM sequence: TTT
aatgctttatatgcctattc

SEQ ID NO: 409636 - DNA, 20 bp, Artificial Sequence
  Description of Artificial Sequence: Synthetic oligonucleotide
  Target: LAMA2; (+) strand; PAM type: YTN; PAM sequence: TTA
atgctttatatgcctattct

SEQ ID NO: 409637 - DNA, 20 bp, Artificial Sequence
  Description of Artificial Sequence: Synthetic oligonucleotide
  Target: LAMA2; (+) strand; PAM type: YTN; PAM sequence: CTT
tatatgcctattctatggca

SEQ ID NO: 409638 - DNA, 20 bp, Artificial Sequence
  Description of Artificial Sequence: Synthetic oligonucleotide
  Target: LAMA2; (+) strand; PAM type: YTN; PAM sequence: TTT
atatgcctattctatggcat

SEQ ID NO: 409639 - DNA, 20 bp, Artificial Sequence
  Description of Artificial Sequence: Synthetic oligonucleotide
  Target: LAMA2; (+) strand; PAM type: YTN; PAM sequence: TTA
tatgcctattctatggcatg

SEQ ID NO: 409640 - DNA, 20 bp, Artificial Sequence
  Description of Artificial Sequence: Synthetic oligonucleotide
  Target: LAMA2; (+) strand; PAM type: YTN; PAM sequence: CTA
ttctatggcatgatttgtgt

SEQ ID NO: 409641 - DNA, 20 bp, Artificial Sequence
  Description of Artificial Sequence: Synthetic oligonucleotide
  Target: LAMA2; (+) strand; PAM type: YTN; PAM sequence: TTC
tatggcatgatttgtgtcac

SEQ ID NO: 409642 - DNA, 20 bp, Artificial Sequence
  Description of Artificial Sequence: Synthetic oligonucleotide
  Target: LAMA2; (+) strand; PAM type: YTN; PAM sequence: CTA
tggcatgatttgtgtcacat

SEQ ID NO: 409643 - DNA, 20 bp, Artificial Sequence
  Description of Artificial Sequence: Synthetic oligonucleotide
  Target: LAMA2; (+) strand; PAM type: YTN; PAM sequence: TTT
gtgtcacatactagacaaag

SEQ ID NO: 409644 - DNA, 20 bp, Artificial Sequence
  Description of Artificial Sequence: Synthetic oligonucleotide
  Target: LAMA2; (+) strand; PAM type: YTN; PAM sequence: TTG
tgtcacatactagacaaaga

SEQ ID NO: 409645 - DNA, 20 bp, Artificial Sequence
  Description of Artificial Sequence: Synthetic oligonucleotide
  Target: LAMA2; (+) strand; PAM type: YTN; PAM sequence: CTA
gacaaagatgatttgttttc

SEQ ID NO: 409646 - DNA, 20 bp, Artificial Sequence
  Description of Artificial Sequence: Synthetic oligonucleotide
  Target: LAMA2; (+) strand; PAM type: YTN; PAM sequence: TTT
gttttcattgttctgaatgt

SEQ ID NO: 409647 - DNA, 20 bp, Artificial Sequence
  Description of Artificial Sequence: Synthetic oligonucleotide
  Target: LAMA2; (+) strand; PAM type: YTN; PAM sequence: TTG
ttttcattgttctgaatgta

SEQ ID NO: 409648 - DNA, 20 bp, Artificial Sequence
  Description of Artificial Sequence: Synthetic oligonucleotide
  Target: LAMA2; (+) strand; PAM type: YTN; PAM sequence: TTT
tcattgttctgaatgtatgt

SEQ ID NO: 409649 - DNA, 20 bp, Artificial Sequence
  Description of Artificial Sequence: Synthetic oligonucleotide
  Target: LAMA2; (+) strand; PAM type: YTN; PAM sequence: TTT
cattgttctgaatgtatgtg

SEQ ID NO: 409650 - DNA, 20 bp, Artificial Sequence
  Description of Artificial Sequence: Synthetic oligonucleotide
  Target: LAMA2; (+) strand; PAM type: YTN; PAM sequence: TTC
attgttctgaatgtatgtga

SEQ ID NO: 409651 - DNA, 20 bp, Artificial Sequence
  Description of Artificial Sequence: Synthetic oligonucleotide
  Target: LAMA2; (+) strand; PAM type: YTN; PAM sequence: TTG
ttctgaatgtatgtgagatc

SEQ ID NO: 409652 - DNA, 20 bp, Artificial Sequence
  Description of Artificial Sequence: Synthetic oligonucleotide
  Target: LAMA2; (+) strand; PAM type: YTN; PAM sequence: TTC
tgaatgtatgtgagatctgt

SEQ ID NO: 409653 - DNA, 20 bp, Artificial Sequence
  Description of Artificial Sequence: Synthetic oligonucleotide
  Target: LAMA2; (+) strand; PAM type: YTN; PAM sequence: CTG
aatgtatgtgagatctgtaa

SEQ ID NO: 409654 - DNA, 20 bp, Artificial Sequence
  Description of Artificial Sequence: Synthetic oligonucleotide
  Target: LAMA2; (+) strand; PAM type: YTN; PAM sequence: CTG
taataacatcctttcatcac

SEQ ID NO: 409655 - DNA, 20 bp, Artificial Sequence
  Description of Artificial Sequence: Synthetic oligonucleotide
  Target: LAMA2; (+) strand; PAM type: YTN; PAM sequence: CTT
tcatcacagatgagaaaata

SEQ ID NO: 409656 - DNA, 20 bp, Artificial Sequence
  Description of Artificial Sequence: Synthetic oligonucleotide
  Target: LAMA2; (+) strand; PAM type: YTN; PAM sequence: TTT
catcacagatgagaaaatat

SEQ ID NO: 409657 - DNA, 20 bp, Artificial Sequence
  Description of Artificial Sequence: Synthetic oligonucleotide
  Target: LAMA2; (+) strand; PAM type: YTN; PAM sequence: TTC
atcacagatgagaaaatatt

SEQ ID NO: 409658 - DNA, 20 bp, Artificial Sequence
  Description of Artificial Sequence: Synthetic oligonucleotide
  Target: LAMA2; (+) strand; PAM type: YTN; PAM sequence: TTA
actaacctgcccaaaatcat

SEQ ID NO: 409659 - DNA, 20 bp, Artificial Sequence
  Description of Artificial Sequence: Synthetic oligonucleotide
  Target: LAMA2; (+) strand; PAM type: YTN; PAM sequence: CTA
acctgcccaaaatcatgtac

SEQ ID NO: 409660 - DNA, 20 bp, Artificial Sequence
  Description of Artificial Sequence: Synthetic oligonucleotide
  Target: LAMA2; (+) strand; PAM type: YTN; PAM sequence: CTG
cccaaaatcatgtactacaa

SEQ ID NO: 409661 - DNA, 20 bp, Artificial Sequence
  Description of Artificial Sequence: Synthetic oligonucleotide
  Target: LAMA2; (+) strand; PAM type: YTN; PAM sequence: CTA
caaataacaggaccaggtat

SEQ ID NO: 409662 - DNA, 20 bp, Artificial Sequence
  Description of Artificial Sequence: Synthetic oligonucleotide
  Target: LAMA2; (+) strand; PAM type: YTN; PAM sequence: TTA
aatgagatgatatatttgac

SEQ ID NO: 409663 - DNA, 20 bp, Artificial Sequence
  Description of Artificial Sequence: Synthetic oligonucleotide
  Target: LAMA2; (+) strand; PAM type: YTN; PAM sequence: TTT
gacttaaatacctccatcta

SEQ ID NO: 409664 - DNA, 20 bp, Artificial Sequence
  Description of Artificial Sequence: Synthetic oligonucleotide
  Target: LAMA2; (+) strand; PAM type: YTN; PAM sequence: TTG
acttaaatacctccatctat

SEQ ID NO: 409665 - DNA, 20 bp, Artificial Sequence
  Description of Artificial Sequence: Synthetic oligonucleotide
  Target: LAMA2; (+) strand; PAM type: YTN; PAM sequence: CTT
aaatacctccatctatgcac

SEQ ID NO: 409666 - DNA, 20 bp, Artificial Sequence
  Description of Artificial Sequence: Synthetic oligonucleotide
  Target: LAMA2; (+) strand; PAM type: YTN; PAM sequence: TTA
aatacctccatctatgcaca

SEQ ID NO: 409667 - DNA, 20 bp, Artificial Sequence
  Description of Artificial Sequence: Synthetic oligonucleotide
  Target: LAMA2; (+) strand; PAM type: YTN; PAM sequence: CTC
catctatgcacagccaatag

SEQ ID NO: 409668 - DNA, 20 bp, Artificial Sequence
  Description of Artificial Sequence: Synthetic oligonucleotide
  Target: LAMA2; (+) strand; PAM type: YTN; PAM sequence: CTA
tgcacagccaatagattatt

SEQ ID NO: 409669 - DNA, 20 bp, Artificial Sequence
  Description of Artificial Sequence: Synthetic oligonucleotide
  Target: LAMA2; (+) strand; PAM type: YTN; PAM sequence: TTA
ttcttacatttttgtgtgac

SEQ ID NO: 409670 - DNA, 20 bp, Artificial Sequence
  Description of Artificial Sequence: Synthetic oligonucleotide
  Target: LAMA2; (+) strand; PAM type: YTN; PAM sequence: TTC
ttacatttttgtgtgaccat

SEQ ID NO: 409671 - DNA, 20 bp, Artificial Sequence
  Description of Artificial Sequence: Synthetic oligonucleotide
  Target: LAMA2; (+) strand; PAM type: YTN; PAM sequence: CTT
acatttttgtgtgaccataa

SEQ ID NO: 409672 - DNA, 20 bp, Artificial Sequence
  Description of Artificial Sequence: Synthetic oligonucleotide
  Target: LAMA2; (+) strand; PAM type: YTN; PAM sequence: TTA
catttttgtgtgaccataaa

SEQ ID NO: 409673 - DNA, 20 bp, Artificial Sequence
  Description of Artificial Sequence: Synthetic oligonucleotide
  Target: LAMA2; (+) strand; PAM type: YTN; PAM sequence: TTT
ttgtgtgaccataaaggttt

SEQ ID NO: 409674 - DNA, 20 bp, Artificial Sequence
  Description of Artificial Sequence: Synthetic oligonucleotide
  Target: LAMA2; (+) strand; PAM type: YTN; PAM sequence: TTT
tgtgtgaccataaaggttta

SEQ ID NO: 409675 - DNA, 20 bp, Artificial Sequence
  Description of Artificial Sequence: Synthetic oligonucleotide
  Target: LAMA2; (+) strand; PAM type: YTN; PAM sequence: TTT
gtgtgaccataaaggtttat

SEQ ID NO: 409676 - DNA, 20 bp, Artificial Sequence
  Description of Artificial Sequence: Synthetic oligonucleotide
  Target: LAMA2; (+) strand; PAM type: YTN; PAM sequence: TTG
tgtgaccataaaggtttata

SEQ ID NO: 409677 - DNA, 20 bp, Artificial Sequence
  Description of Artificial Sequence: Synthetic oligonucleotide
  Target: LAMA2; (+) strand; PAM type: YTN; PAM sequence: TTT
atattactaaatgttgatta

SEQ ID NO: 409678 - DNA, 20 bp, Artificial Sequence
  Description of Artificial Sequence: Synthetic oligonucleotide
  Target: LAMA2; (+) strand; PAM type: YTN; PAM sequence: TTA
tattactaaatgttgattat

SEQ ID NO: 409679 - DNA, 20 bp, Artificial Sequence
  Description of Artificial Sequence: Synthetic oligonucleotide
  Target: LAMA2; (+) strand; PAM type: YTN; PAM sequence: TTA
ctaaatgttgattatgatgt

SEQ ID NO: 409680 - DNA, 20 bp, Artificial Sequence
  Description of Artificial Sequence: Synthetic oligonucleotide
  Target: LAMA2; (+) strand; PAM type: YTN; PAM sequence: CTA
aatgttgattatgatgtatg

SEQ ID NO: 409681 - DNA, 20 bp, Artificial Sequence
  Description of Artificial Sequence: Synthetic oligonucleotide
  Target: LAMA2; (+) strand; PAM type: YTN; PAM sequence: TTG
attatgatgtatgattatta

SEQ ID NO: 409682 - DNA, 20 bp, Artificial Sequence
  Description of Artificial Sequence: Synthetic oligonucleotide
  Target: LAMA2; (+) strand; PAM type: YTN; PAM sequence: TTA
tgatgtatgattattaattt

SEQ ID NO: 409683 - DNA, 20 bp, Artificial Sequence
  Description of Artificial Sequence: Synthetic oligonucleotide
  Target: LAMA2; (+) strand; PAM type: YTN; PAM sequence: TTA
ttaatttggagatatttgca

SEQ ID NO: 409684 - DNA, 20 bp, Artificial Sequence
  Description of Artificial Sequence: Synthetic oligonucleotide
  Target: LAMA2; (+) strand; PAM type: YTN; PAM sequence: TTA
atttggagatatttgcatta

SEQ ID NO: 409685 - DNA, 20 bp, Artificial Sequence
  Description of Artificial Sequence: Synthetic oligonucleotide
  Target: LAMA2; (+) strand; PAM type: YTN; PAM sequence: TTT
ggagatatttgcattatccc

SEQ ID NO: 409686 - DNA, 20 bp, Artificial Sequence
  Description of Artificial Sequence: Synthetic oligonucleotide
  Target: LAMA2; (+) strand; PAM type: YTN; PAM sequence: TTG
gagatatttgcattatccca

SEQ ID NO: 409687 - DNA, 20 bp, Artificial Sequence
  Description of Artificial Sequence: Synthetic oligonucleotide
  Target: LAMA2; (+) strand; PAM type: YTN; PAM sequence: TTT
gcattatcccaacacttttc

SEQ ID NO: 409688 - DNA, 20 bp, Artificial Sequence
  Description of Artificial Sequence: Synthetic oligonucleotide
  Target: LAMA2; (+) strand; PAM type: YTN; PAM sequence: TTG
cattatcccaacacttttca

SEQ ID NO: 409689 - DNA, 20 bp, Artificial Sequence
  Description of Artificial Sequence: Synthetic oligonucleotide
  Target: LAMA2; (+) strand; PAM type: YTN; PAM sequence: TTA
tcccaacacttttcagattt

SEQ ID NO: 409690 - DNA, 20 bp, Artificial Sequence
  Description of Artificial Sequence: Synthetic oligonucleotide
  Target: LAMA2; (+) strand; PAM type: YTN; PAM sequence: CTT
ttcagattttcagactatgc

SEQ ID NO: 409691 - DNA, 20 bp, Artificial Sequence
  Description of Artificial Sequence: Synthetic oligonucleotide
  Target: LAMA2; (+) strand; PAM type: YTN; PAM sequence: TTT
tcagattttcagactatgca

SEQ ID NO: 409692 - DNA, 20 bp, Artificial Sequence
  Description of Artificial Sequence: Synthetic oligonucleotide
  Target: LAMA2; (+) strand; PAM type: YTN; PAM sequence: TTT
cagattttcagactatgcat

SEQ ID NO: 409693 - DNA, 20 bp, Artificial Sequence
  Description of Artificial Sequence: Synthetic oligonucleotide
  Target: LAMA2; (+) strand; PAM type: YTN; PAM sequence: TTC
agattttcagactatgcatg

SEQ ID NO: 409694 - DNA, 20 bp, Artificial Sequence
  Description of Artificial Sequence: Synthetic oligonucleotide
  Target: LAMA2; (+) strand; PAM type: YTN; PAM sequence: TTT
tcagactatgcatgtcagtc

SEQ ID NO: 409695 - DNA, 20 bp, Artificial Sequence
  Description of Artificial Sequence: Synthetic oligonucleotide
  Target: LAMA2; (+) strand; PAM type: YTN; PAM sequence: TTT
cagactatgcatgtcagtca

SEQ ID NO: 409696 - DNA, 20 bp, Artificial Sequence
  Description of Artificial Sequence: Synthetic oligonucleotide
  Target: LAMA2; (+) strand; PAM type: YTN; PAM sequence: TTC
agactatgcatgtcagtcat

SEQ ID NO: 409697 - DNA, 20 bp, Artificial Sequence
  Description of Artificial Sequence: Synthetic oligonucleotide
  Target: LAMA2; (+) strand; PAM type: YTN; PAM sequence: CTA
tgcatgtcagtcatcatttc

SEQ ID NO: 409698 - DNA, 20 bp, Artificial Sequence
  Description of Artificial Sequence: Synthetic oligonucleotide
  Target: LAMA2; (+) strand; PAM type: YTN; PAM sequence: TTT
cttttcctaaaatcctggac

SEQ ID NO: 409699 - DNA, 20 bp, Artificial Sequence
  Description of Artificial Sequence: Synthetic oligonucleotide
  Target: LAMA2; (+) strand; PAM type: YTN; PAM sequence: TTC
ttttcctaaaatcctggaca

SEQ ID NO: 409700 - DNA, 20 bp, Artificial Sequence
  Description of Artificial Sequence: Synthetic oligonucleotide
  Target: LAMA2; (+) strand; PAM type: YTN; PAM sequence: CTT
ttcctaaaatcctggacaaa

SEQ ID NO: 409701 - DNA, 20 bp, Artificial Sequence
  Description of Artificial Sequence: Synthetic oligonucleotide
  Target: LAMA2; (+) strand; PAM type: YTN; PAM sequence: TTT
tcctaaaatcctggacaaaa

SEQ ID NO: 409702 - DNA, 20 bp, Artificial Sequence
  Description of Artificial Sequence: Synthetic oligonucleotide
  Target: LAMA2; (+) strand; PAM type: YTN; PAM sequence: TTT
cctaaaatcctggacaaaat

SEQ ID NO: 409703 - DNA, 20 bp, Artificial Sequence
  Description of Artificial Sequence: Synthetic oligonucleotide
  Target: LAMA2; (+) strand; PAM type: YTN; PAM sequence: TTC
ctaaaatcctggacaaaatg

SEQ ID NO: 409704 - DNA, 20 bp, Artificial Sequence
  Description of Artificial Sequence: Synthetic oligonucleotide
  Target: LAMA2; (+) strand; PAM type: YTN; PAM sequence: CTA
aaatcctggacaaaatgata

SEQ ID NO: 409705 - DNA, 20 bp, Artificial Sequence
  Description of Artificial Sequence: Synthetic oligonucleotide
  Target: LAMA2; (+) strand; PAM type: YTN; PAM sequence: CTG
gacaaaatgatagctttaat

SEQ ID NO: 409706 - DNA, 20 bp, Artificial Sequence
  Description of Artificial Sequence: Synthetic oligonucleotide
  Target: LAMA2; (+) strand; PAM type: YTN; PAM sequence: CTT
taataccgcctcacaaaata

SEQ ID NO: 409707 - DNA, 20 bp, Artificial Sequence
  Description of Artificial Sequence: Synthetic oligonucleotide
  Target: LAMA2; (+) strand; PAM type: YTN; PAM sequence: TTT
aataccgcctcacaaaataa

SEQ ID NO: 409708 - DNA, 20 bp, Artificial Sequence
  Description of Artificial Sequence: Synthetic oligonucleotide
  Target: LAMA2; (+) strand; PAM type: YTN; PAM sequence: TTA
ataccgcctcacaaaataat

SEQ ID NO: 409709 - DNA, 20 bp, Artificial Sequence
  Description of Artificial Sequence: Synthetic oligonucleotide
  Target: LAMA2; (+) strand; PAM type: YTN; PAM sequence: CTC
acaaaataattggattttca

SEQ ID NO: 409710 - DNA, 20 bp, Artificial Sequence
  Description of Artificial Sequence: Synthetic oligonucleotide
  Target: LAMA2; (+) strand; PAM type: YTN; PAM sequence: TTG
gattttcaccaaactggggg

SEQ ID NO: 409711 - DNA, 20 bp, Artificial Sequence
  Description of Artificial Sequence: Synthetic oligonucleotide
  Target: LAMA2; (+) strand; PAM type: YTN; PAM sequence: TTT
tcaccaaactgggggccaag

SEQ ID NO: 409712 - DNA, 20 bp, Artificial Sequence
  Description of Artificial Sequence: Synthetic oligonucleotide
  Target: LAMA2; (+) strand; PAM type: YTN; PAM sequence: TTT
caccaaactgggggccaagc

SEQ ID NO: 409713 - DNA, 20 bp, Artificial Sequence
  Description of Artificial Sequence: Synthetic oligonucleotide
  Target: LAMA2; (+) strand; PAM type: YTN; PAM sequence: TTC
accaaactgggggccaagct

SEQ ID NO: 409714 - DNA, 20 bp, Artificial Sequence
  Description of Artificial Sequence: Synthetic oligonucleotide
  Target: LAMA2; (+) strand; PAM type: YTN; PAM sequence: CTG
ggggccaagcttctcaagaa

SEQ ID NO: 409715 - DNA, 20 bp, Artificial Sequence
  Description of Artificial Sequence: Synthetic oligonucleotide
  Target: LAMA2; (+) strand; PAM type: YTN; PAM sequence: CTT
ctcaagaagctccttctccc

SEQ ID NO: 409716 - DNA, 20 bp, Artificial Sequence
  Description of Artificial Sequence: Synthetic oligonucleotide
  Target: LAMA2; (+) strand; PAM type: YTN; PAM sequence: TTC
tcaagaagctccttctccct

SEQ ID NO: 409717 - DNA, 20 bp, Artificial Sequence
  Description of Artificial Sequence: Synthetic oligonucleotide
  Target: LAMA2; (+) strand; PAM type: YTN; PAM sequence: CTC
aagaagctccttctcccttg

SEQ ID NO: 409718 - DNA, 20 bp, Artificial Sequence
  Description of Artificial Sequence: Synthetic oligonucleotide
  Target: LAMA2; (+) strand; PAM type: YTN; PAM sequence: CTC
cttctcccttgtcctctgcc

SEQ ID NO: 409719 - DNA, 20 bp, Artificial Sequence
  Description of Artificial Sequence: Synthetic oligonucleotide
  Target: LAMA2; (+) strand; PAM type: YTN; PAM sequence: CTT
ctcccttgtcctctgcctct

SEQ ID NO: 409720 - DNA, 20 bp, Artificial Sequence
  Description of Artificial Sequence: Synthetic oligonucleotide
  Target: LAMA2; (+) strand; PAM type: YTN; PAM sequence: TTC
tcccttgtcctctgcctctc

SEQ ID NO: 409721 - DNA, 20 bp, Artificial Sequence
  Description of Artificial Sequence: Synthetic oligonucleotide
  Target: LAMA2; (+) strand; PAM type: YTN; PAM sequence: CTC
ccttgtcctctgcctctctt

SEQ ID NO: 409722 - DNA, 20 bp, Artificial Sequence
  Description of Artificial Sequence: Synthetic oligonucleotide
  Target: LAMA2; (+) strand; PAM type: YTN; PAM sequence: CTT
gtcctctgcctctctttact

SEQ ID NO: 409723 - DNA, 20 bp, Artificial Sequence
  Description of Artificial Sequence: Synthetic oligonucleotide
  Target: LAMA2; (+) strand; PAM type: YTN; PAM sequence: TTG
tcctctgcctctctttactc

SEQ ID NO: 409724 - DNA, 20 bp, Artificial Sequence
  Description of Artificial Sequence: Synthetic oligonucleotide
  Target: LAMA2; (+) strand; PAM type: YTN; PAM sequence: CTC
tgcctctctttactcctcct

SEQ ID NO: 409725 - DNA, 20 bp, Artificial Sequence
  Description of Artificial Sequence: Synthetic oligonucleotide
  Target: LAMA2; (+) strand; PAM type: YTN; PAM sequence: CTG
cctctctttactcctcctcc

SEQ ID NO: 409726 - DNA, 20 bp, Artificial Sequence
  Description of Artificial Sequence: Synthetic oligonucleotide
  Target: LAMA2; (+) strand; PAM type: YTN; PAM sequence: CTC
tctttactcctcctccctca

SEQ ID NO: 409727 - DNA, 20 bp, Artificial Sequence
  Description of Artificial Sequence: Synthetic oligonucleotide
  Target: LAMA2; (+) strand; PAM type: YTN; PAM sequence: CTC
tttactcctcctccctcatt

SEQ ID NO: 409728 - DNA, 20 bp, Artificial Sequence
  Description of Artificial Sequence: Synthetic oligonucleotide
  Target: LAMA2; (+) strand; PAM type: YTN; PAM sequence: CTT
tactcctcctccctcattct

SEQ ID NO: 409729 - DNA, 20 bp, Artificial Sequence
  Description of Artificial Sequence: Synthetic oligonucleotide
  Target: LAMA2; (+) strand; PAM type: YTN; PAM sequence: TTT
actcctcctccctcattctc

SEQ ID NO: 409730 - DNA, 20 bp, Artificial Sequence
  Description of Artificial Sequence: Synthetic oligonucleotide
  Target: LAMA2; (+) strand; PAM type: YTN; PAM sequence: TTA
ctcctcctccctcattctct

SEQ ID NO: 409731 - DNA, 20 bp, Artificial Sequence
  Description of Artificial Sequence: Synthetic oligonucleotide
  Target: LAMA2; (+) strand; PAM type: YTN; PAM sequence: CTC
ctcctccctcattctctctc

SEQ ID NO: 409732 - DNA, 20 bp, Artificial Sequence
  Description of Artificial Sequence: Synthetic oligonucleotide
  Target: LAMA2; (+) strand; PAM type: YTN; PAM sequence: CTC
ctccctcattctctctccct

SEQ ID NO: 409733 - DNA, 20 bp, Artificial Sequence
  Description of Artificial Sequence: Synthetic oligonucleotide
  Target: LAMA2; (+) strand; PAM type: YTN; PAM sequence: CTC
cctcattctctctcccttcc

SEQ ID NO: 409734 - DNA, 20 bp, Artificial Sequence
  Description of Artificial Sequence: Synthetic oligonucleotide
  Target: LAMA2; (+) strand; PAM type: YTN; PAM sequence: CTC
attctctctcccttccaccc

SEQ ID NO: 409735 - DNA, 20 bp, Artificial Sequence
  Description of Artificial Sequence: Synthetic oligonucleotide
  Target: LAMA2; (+) strand; PAM type: YTN; PAM sequence: TTC
tctctcccttccaccccttc

SEQ ID NO: 409736 - DNA, 20 bp, Artificial Sequence
  Description of Artificial Sequence: Synthetic oligonucleotide
  Target: LAMA2; (+) strand; PAM type: YTN; PAM sequence: CTC
tctcccttccaccccttcat

SEQ ID NO: 409737 - DNA, 20 bp, Artificial Sequence
  Description of Artificial Sequence: Synthetic oligonucleotide
  Target: LAMA2; (+) strand; PAM type: YTN; PAM sequence: CTC
tcccttccaccccttcatct

SEQ ID NO: 409738 - DNA, 20 bp, Artificial Sequence
  Description of Artificial Sequence: Synthetic oligonucleotide
  Target: LAMA2; (+) strand; PAM type: YTN; PAM sequence: CTC
ccttccaccccttcatctgg

SEQ ID NO: 409739 - DNA, 20 bp, Artificial Sequence
  Description of Artificial Sequence: Synthetic oligonucleotide
  Target: LAMA2; (+) strand; PAM type: YTN; PAM sequence: CTT
ccaccccttcatctggaaaa

SEQ ID NO: 409740 - DNA, 20 bp, Artificial Sequence
  Description of Artificial Sequence: Synthetic oligonucleotide
  Target: LAMA2; (+) strand; PAM type: YTN; PAM sequence: TTC
caccccttcatctggaaaaa

SEQ ID NO: 409741 - DNA, 20 bp, Artificial Sequence
  Description of Artificial Sequence: Synthetic oligonucleotide
  Target: LAMA2; (+) strand; PAM type: YTN; PAM sequence: CTT
catctggaaaaatctccctt

SEQ ID NO: 409742 - DNA, 20 bp, Artificial Sequence
  Description of Artificial Sequence: Synthetic oligonucleotide
  Target: LAMA2; (+) strand; PAM type: YTN; PAM sequence: TTC
atctggaaaaatctcccttt

SEQ ID NO: 409743 - DNA, 20 bp, Artificial Sequence
  Description of Artificial Sequence: Synthetic oligonucleotide
  Target: LAMA2; (+) strand; PAM type: YTN; PAM sequence: CTG
gaaaaatctccctttagtca

SEQ ID NO: 409744 - DNA, 20 bp, Artificial Sequence
  Description of Artificial Sequence: Synthetic oligonucleotide
  Target: LAMA2; (+) strand; PAM type: YTN; PAM sequence: CTC
cctttagtcactttggtatc

SEQ ID NO: 409745 - DNA, 20 bp, Artificial Sequence
  Description of Artificial Sequence: Synthetic oligonucleotide
  Target: LAMA2; (+) strand; PAM type: YTN; PAM sequence: CTT
tagtcactttggtatctaat

SEQ ID NO: 409746 - DNA, 20 bp, Artificial Sequence
  Description of Artificial Sequence: Synthetic oligonucleotide
  Target: LAMA2; (+) strand; PAM type: YTN; PAM sequence: TTT
agtcactttggtatctaatt

SEQ ID NO: 409747 - DNA, 20 bp, Artificial Sequence
  Description of Artificial Sequence: Synthetic oligonucleotide
  Target: LAMA2; (+) strand; PAM type: YTN; PAM sequence: TTA
gtcactttggtatctaattt

SEQ ID NO: 409748 - DNA, 20 bp, Artificial Sequence
  Description of Artificial Sequence: Synthetic oligonucleotide
  Target: LAMA2; (+) strand; PAM type: YTN; PAM sequence: CTT
tggtatctaatttcttggca

SEQ ID NO: 409749 - DNA, 20 bp, Artificial Sequence
  Description of Artificial Sequence: Synthetic oligonucleotide
  Target: LAMA2; (+) strand; PAM type: YTN; PAM sequence: TTT
ggtatctaatttcttggcac

SEQ ID NO: 409750 - DNA, 20 bp, Artificial Sequence
  Description of Artificial Sequence: Synthetic oligonucleotide
  Target: LAMA2; (+) strand; PAM type: YTN; PAM sequence: TTG
gtatctaatttcttggcact

SEQ ID NO: 409751 - DNA, 20 bp, Artificial Sequence
  Description of Artificial Sequence: Synthetic oligonucleotide
  Target: LAMA2; (+) strand; PAM type: YTN; PAM sequence: CTA
atttcttggcactccagtga

SEQ ID NO: 409752 - DNA, 20 bp, Artificial Sequence
  Description of Artificial Sequence: Synthetic oligonucleotide
  Target: LAMA2; (+) strand; PAM type: YTN; PAM sequence: TTT
cttggcactccagtgacctc

SEQ ID NO: 409753 - DNA, 20 bp, Artificial Sequence
  Description of Artificial Sequence: Synthetic oligonucleotide
  Target: LAMA2; (+) strand; PAM type: YTN; PAM sequence: TTC
ttggcactccagtgacctct

SEQ ID NO: 409754 - DNA, 20 bp, Artificial Sequence
  Description of Artificial Sequence: Synthetic oligonucleotide
  Target: LAMA2; (+) strand; PAM type: YTN; PAM sequence: CTT
ggcactccagtgacctctgc

SEQ ID NO: 409755 - DNA, 20 bp, Artificial Sequence
  Description of Artificial Sequence: Synthetic oligonucleotide
  Target: LAMA2; (+) strand; PAM type: YTN; PAM sequence: TTG
gcactccagtgacctctgcc

SEQ ID NO: 409756 - DNA, 20 bp, Artificial Sequence
  Description of Artificial Sequence: Synthetic oligonucleotide
  Target: LAMA2; (+) strand; PAM type: YTN; PAM sequence: CTC
cagtgacctctgcctcctat

SEQ ID NO: 409757 - DNA, 20 bp, Artificial Sequence
  Description of Artificial Sequence: Synthetic oligonucleotide
  Target: LAMA2; (+) strand; PAM type: YTN; PAM sequence: CTC
tgcctcctatatctgctttg

SEQ ID NO: 409758 - DNA, 20 bp, Artificial Sequence
  Description of Artificial Sequence: Synthetic oligonucleotide
  Target: LAMA2; (+) strand; PAM type: YTN; PAM sequence: CTG
cctcctatatctgctttgtc

SEQ ID NO: 409759 - DNA, 20 bp, Artificial Sequence
  Description of Artificial Sequence: Synthetic oligonucleotide
  Target: LAMA2; (+) strand; PAM type: YTN; PAM sequence: CTC
ctatatctgctttgtcctct

SEQ ID NO: 409760 - DNA, 20 bp, Artificial Sequence
  Description of Artificial Sequence: Synthetic oligonucleotide
  Target: LAMA2; (+) strand; PAM type: YTN; PAM sequence: CTA
tatctgctttgtcctctgat

SEQ ID NO: 409761 - DNA, 20 bp, Artificial Sequence
  Description of Artificial Sequence: Synthetic oligonucleotide
  Target: LAMA2; (+) strand; PAM type: YTN; PAM sequence: CTG
ctttgtcctctgatccttct

SEQ ID NO: 409762 - DNA, 20 bp, Artificial Sequence
  Description of Artificial Sequence: Synthetic oligonucleotide
  Target: LAMA2; (+) strand; PAM type: YTN; PAM sequence: CTT
tgtcctctgatccttctcct

SEQ ID NO: 409763 - DNA, 20 bp, Artificial Sequence
  Description of Artificial Sequence: Synthetic oligonucleotide
  Target: LAMA2; (+) strand; PAM type: YTN; PAM sequence: TTT
gtcctctgatccttctcctg

SEQ ID NO: 409764 - DNA, 20 bp, Artificial Sequence
  Description of Artificial Sequence: Synthetic oligonucleotide
  Target: LAMA2; (+) strand; PAM type: YTN; PAM sequence: TTG
tcctctgatccttctcctgg

SEQ ID NO: 409765 - DNA, 20 bp, Artificial Sequence
  Description of Artificial Sequence: Synthetic oligonucleotide
  Target: LAMA2; (+) strand; PAM type: YTN; PAM sequence: CTC
tgatccttctcctggcatcc

SEQ ID NO: 409766 - DNA, 20 bp, Artificial Sequence
  Description of Artificial Sequence: Synthetic oligonucleotide
  Target: LAMA2; (+) strand; PAM type: YTN; PAM sequence: CTG
atccttctcctggcatccgc

SEQ ID NO: 409767 - DNA, 20 bp, Artificial Sequence
  Description of Artificial Sequence: Synthetic oligonucleotide
  Target: LAMA2; (+) strand; PAM type: YTN; PAM sequence: CTT
ctcctggcatccgccttggt

SEQ ID NO: 409768 - DNA, 20 bp, Artificial Sequence
  Description of Artificial Sequence: Synthetic oligonucleotide
  Target: LAMA2; (+) strand; PAM type: YTN; PAM sequence: TTC
tcctggcatccgccttggtg

SEQ ID NO: 409769 - DNA, 20 bp, Artificial Sequence
  Description of Artificial Sequence: Synthetic oligonucleotide
  Target: LAMA2; (+) strand; PAM type: YTN; PAM sequence: CTC
ctggcatccgccttggtggc

SEQ ID NO: 409770 - DNA, 20 bp, Artificial Sequence
  Description of Artificial Sequence: Synthetic oligonucleotide
  Target: LAMA2; (+) strand; PAM type: YTN; PAM sequence: CTG
gcatccgccttggtggccag

SEQ ID NO: 409771 - DNA, 20 bp, Artificial Sequence
  Description of Artificial Sequence: Synthetic oligonucleotide
  Target: LAMA2; (+) strand; PAM type: YTN; PAM sequence: CTT
ggtggccagcagttcttact

SEQ ID NO: 409772 - DNA, 20 bp, Artificial Sequence
  Description of Artificial Sequence: Synthetic oligonucleotide
  Target: LAMA2; (+) strand; PAM type: YTN; PAM sequence: TTG
gtggccagcagttcttactg

SEQ ID NO: 409773 - DNA, 20 bp, Artificial Sequence
  Description of Artificial Sequence: Synthetic oligonucleotide
  Target: LAMA2; (+) strand; PAM type: YTN; PAM sequence: TTC
ttactggacaaaaacatcaa

SEQ ID NO: 409774 - DNA, 20 bp, Artificial Sequence
  Description of Artificial Sequence: Synthetic oligonucleotide
  Target: LAMA2; (+) strand; PAM type: YTN; PAM sequence: CTT
actggacaaaaacatcaaac

SEQ ID NO: 409775 - DNA, 20 bp, Artificial Sequence
  Description of Artificial Sequence: Synthetic oligonucleotide
  Target: LAMA2; (+) strand; PAM type: YTN; PAM sequence: TTA
ctggacaaaaacatcaaacc

SEQ ID NO: 409776 - DNA, 20 bp, Artificial Sequence
  Description of Artificial Sequence: Synthetic oligonucleotide
  Target: LAMA2; (+) strand; PAM type: YTN; PAM sequence: CTG
gacaaaaacatcaaacccta

SEQ ID NO: 409777 - DNA, 20 bp, Artificial Sequence
  Description of Artificial Sequence: Synthetic oligonucleotide
  Target: LAMA2; (+) strand; PAM type: YTN; PAM sequence: CTA
agagcctgaagtagttactt

SEQ ID NO: 409778 - DNA, 20 bp, Artificial Sequence
  Description of Artificial Sequence: Synthetic oligonucleotide
  Target: LAMA2; (+) strand; PAM type: YTN; PAM sequence: CTG
aagtagttacttaagcaaat

SEQ ID NO: 409779 - DNA, 20 bp, Artificial Sequence
  Description of Artificial Sequence: Synthetic oligonucleotide
  Target: LAMA2; (+) strand; PAM type: YTN; PAM sequence: TTA
cttaagcaaataggacaagc

SEQ ID NO: 409780 - DNA, 20 bp, Artificial Sequence
  Description of Artificial Sequence: Synthetic oligonucleotide
  Target: LAMA2; (+) strand; PAM type: YTN; PAM sequence: CTT
aagcaaataggacaagcaac

SEQ ID NO: 409781 - DNA, 20 bp, Artificial Sequence
  Description of Artificial Sequence: Synthetic oligonucleotide
  Target: LAMA2; (+) strand; PAM type: YTN; PAM sequence: TTA
agcaaataggacaagcaact

SEQ ID NO: 409782 - DNA, 20 bp, Artificial Sequence
  Description of Artificial Sequence: Synthetic oligonucleotide
  Target: LAMA2; (+) strand; PAM type: YTN; PAM sequence: CTG
aactgagtttttcttctggg

SEQ ID NO: 409783 - DNA, 20 bp, Artificial Sequence
  Description of Artificial Sequence: Synthetic oligonucleotide
  Target: LAMA2; (+) strand; PAM type: YTN; PAM sequence: CTG
agtttttcttctgggaaagc

SEQ ID NO: 409784 - DNA, 20 bp, Artificial Sequence
  Description of Artificial Sequence: Synthetic oligonucleotide
  Target: LAMA2; (+) strand; PAM type: YTN; PAM sequence: TTT
ttcttctgggaaagctttct

SEQ ID NO: 409785 - DNA, 20 bp, Artificial Sequence
  Description of Artificial Sequence: Synthetic oligonucleotide
  Target: LAMA2; (+) strand; PAM type: YTN; PAM sequence: TTT
tcttctgggaaagctttctt

SEQ ID NO: 409786 - DNA, 20 bp, Artificial Sequence
  Description of Artificial Sequence: Synthetic oligonucleotide
  Target: LAMA2; (+) strand; PAM type: YTN; PAM sequence: TTT
cttctgggaaagctttcttc

SEQ ID NO: 409787 - DNA, 20 bp, Artificial Sequence
  Description of Artificial Sequence: Synthetic oligonucleotide
  Target: LAMA2; (+) strand; PAM type: YTN; PAM sequence: TTC
ttctgggaaagctttcttca

SEQ ID NO: 409788 - DNA, 20 bp, Artificial Sequence
  Description of Artificial Sequence: Synthetic oligonucleotide
  Target: LAMA2; (+) strand; PAM type: YTN; PAM sequence: CTT
ctgggaaagctttcttcaca

SEQ ID NO: 409789 - DNA, 20 bp, Artificial Sequence
  Description of Artificial Sequence: Synthetic oligonucleotide
  Target: LAMA2; (+) strand; PAM type: YTN; PAM sequence: TTC
tgggaaagctttcttcacac

SEQ ID NO: 409790 - DNA, 20 bp, Artificial Sequence
  Description of Artificial Sequence: Synthetic oligonucleotide
  Target: LAMA2; (+) strand; PAM type: YTN; PAM sequence: CTG
ggaaagctttcttcacacag

SEQ ID NO: 409791 - DNA, 20 bp, Artificial Sequence
  Description of Artificial Sequence: Synthetic oligonucleotide
  Target: LAMA2; (+) strand; PAM type: YTN; PAM sequence: CTT
tcttcacacaggtacagaaa

SEQ ID NO: 409792 - DNA, 20 bp, Artificial Sequence
  Description of Artificial Sequence: Synthetic oligonucleotide
  Target: LAMA2; (+) strand; PAM type: YTN; PAM sequence: TTT
cttcacacaggtacagaaat

SEQ ID NO: 409793 - DNA, 20 bp, Artificial Sequence
  Description of Artificial Sequence: Synthetic oligonucleotide
  Target: LAMA2; (+) strand; PAM type: YTN; PAM sequence: TTC
ttcacacaggtacagaaata

SEQ ID NO: 409794 - DNA, 20 bp, Artificial Sequence
  Description of Artificial Sequence: Synthetic oligonucleotide
  Target: LAMA2; (+) strand; PAM type: YTN; PAM sequence: CTT
cacacaggtacagaaatagg

SEQ ID NO: 409795 - DNA, 20 bp, Artificial Sequence
  Description of Artificial Sequence: Synthetic oligonucleotide
  Target: LAMA2; (+) strand; PAM type: YTN; PAM sequence: TTC
acacaggtacagaaataggc

SEQ ID NO: 409796 - DNA, 20 bp, Artificial Sequence
  Description of Artificial Sequence: Synthetic oligonucleotide
  Target: LAMA2; (+) strand; PAM type: YTN; PAM sequence: CTA
aaggtcaggaagtagggtga

SEQ ID NO: 409797 - DNA, 20 bp, Artificial Sequence
  Description of Artificial Sequence: Synthetic oligonucleotide
  Target: LAMA2; (+) strand; PAM type: YTN; PAM sequence: TTT
taggagtcatttggggtttc

SEQ ID NO: 409798 - DNA, 20 bp, Artificial Sequence
  Description of Artificial Sequence: Synthetic oligonucleotide
  Target: LAMA2; (+) strand; PAM type: YTN; PAM sequence: TTT
aggagtcatttggggtttcc

SEQ ID NO: 409799 - DNA, 20 bp, Artificial Sequence
  Description of Artificial Sequence: Synthetic oligonucleotide
  Target: LAMA2; (+) strand; PAM type: YTN; PAM sequence: TTA
ggagtcatttggggtttcca

SEQ ID NO: 409800 - DNA, 20 bp, Artificial Sequence
  Description of Artificial Sequence: Synthetic oligonucleotide
  Target: LAMA2; (+) strand; PAM type: YTN; PAM sequence: TTT
ggggtttccagaatgagata

SEQ ID NO: 409801 - DNA, 20 bp, Artificial Sequence
  Description of Artificial Sequence: Synthetic oligonucleotide
  Target: LAMA2; (+) strand; PAM type: YTN; PAM sequence: TTG
gggtttccagaatgagataa

SEQ ID NO: 409802 - DNA, 20 bp, Artificial Sequence
  Description of Artificial Sequence: Synthetic oligonucleotide
  Target: LAMA2; (+) strand; PAM type: YTN; PAM sequence: TTT
ccagaatgagataaagattt

SEQ ID NO: 409803 - DNA, 20 bp, Artificial Sequence
  Description of Artificial Sequence: Synthetic oligonucleotide
  Target: LAMA2; (+) strand; PAM type: YTN; PAM sequence: TTC
cagaatgagataaagatttt

SEQ ID NO: 409804 - DNA, 20 bp, Artificial Sequence
  Description of Artificial Sequence: Synthetic oligonucleotide
  Target: LAMA2; (+) strand; PAM type: YTN; PAM sequence: TTT
taacactgaaccctaaatat

SEQ ID NO: 409805 - DNA, 20 bp, Artificial Sequence
  Description of Artificial Sequence: Synthetic oligonucleotide
  Target: LAMA2; (+) strand; PAM type: YTN; PAM sequence: TTT
aacactgaaccctaaatatt

SEQ ID NO: 409806 - DNA, 20 bp, Artificial Sequence
  Description of Artificial Sequence: Synthetic oligonucleotide
  Target: LAMA2; (+) strand; PAM type: YTN; PAM sequence: TTA
acactgaaccctaaatattt

SEQ ID NO: 409807 - DNA, 20 bp, Artificial Sequence
  Description of Artificial Sequence: Synthetic oligonucleotide
  Target: LAMA2; (+) strand; PAM type: YTN; PAM sequence: CTG
aaccctaaatattttctttc

SEQ ID NO: 409808 - DNA, 20 bp, Artificial Sequence
  Description of Artificial Sequence: Synthetic oligonucleotide
  Target: LAMA2; (+) strand; PAM type: YTN; PAM sequence: CTA
aatattttctttcttaacat

SEQ ID NO: 409809 - DNA, 20 bp, Artificial Sequence
  Description of Artificial Sequence: Synthetic oligonucleotide
  Target: LAMA2; (+) strand; PAM type: YTN; PAM sequence: TTT
tctttcttaacatccaaagt

SEQ ID NO: 409810 - DNA, 20 bp, Artificial Sequence
  Description of Artificial Sequence: Synthetic oligonucleotide
  Target: LAMA2; (+) strand; PAM type: YTN; PAM sequence: TTT
ctttcttaacatccaaagta

SEQ ID NO: 409811 - DNA, 20 bp, Artificial Sequence
  Description of Artificial Sequence: Synthetic oligonucleotide
  Target: LAMA2; (+) strand; PAM type: YTN; PAM sequence: TTC
tttcttaacatccaaagtat

SEQ ID NO: 409812 - DNA, 20 bp, Artificial Sequence
  Description of Artificial Sequence: Synthetic oligonucleotide
  Target: LAMA2; (+) strand; PAM type: YTN; PAM sequence: CTT
tcttaacatccaaagtatgt

SEQ ID NO: 409813 - DNA, 20 bp, Artificial Sequence
  Description of Artificial Sequence: Synthetic oligonucleotide
  Target: LAMA2; (+) strand; PAM type: YTN; PAM sequence: TTT
cttaacatccaaagtatgtt

SEQ ID NO: 409814 - DNA, 20 bp, Artificial Sequence
  Description of Artificial Sequence: Synthetic oligonucleotide
  Target: LAMA2; (+) strand; PAM type: YTN; PAM sequence: TTC
ttaacatccaaagtatgttc

SEQ ID NO: 409815 - DNA, 20 bp, Artificial Sequence
  Description of Artificial Sequence: Synthetic oligonucleotide
  Target: LAMA2; (+) strand; PAM type: YTN; PAM sequence: CTT
aacatccaaagtatgttcaa

SEQ ID NO: 409816 - DNA, 20 bp, Artificial Sequence
  Description of Artificial Sequence: Synthetic oligonucleotide
  Target: LAMA2; (+) strand; PAM type: YTN; PAM sequence: TTA
acatccaaagtatgttcaaa

SEQ ID NO: 409817 - DNA, 20 bp, Artificial Sequence
  Description of Artificial Sequence: Synthetic oligonucleotide
  Target: LAMA2; (+) strand; PAM type: YTN; PAM sequence: TTC
aaacagaaaaaagattagat

SEQ ID NO: 409818 - DNA, 20 bp, Artificial Sequence
  Description of Artificial Sequence: Synthetic oligonucleotide
  Target: LAMA2; (+) strand; PAM type: YTN; PAM sequence: TTA
gattctatttattatgtaaa

SEQ ID NO: 409819 - DNA, 20 bp, Artificial Sequence
  Description of Artificial Sequence: Synthetic oligonucleotide
  Target: LAMA2; (+) strand; PAM type: YTN; PAM sequence: TTC
tatttattatgtaaattaca

SEQ ID NO: 409820 - DNA, 20 bp, Artificial Sequence
  Description of Artificial Sequence: Synthetic oligonucleotide
  Target: LAMA2; (+) strand; PAM type: YTN; PAM sequence: CTA
tttattatgtaaattacaaa

SEQ ID NO: 409821 - DNA, 20 bp, Artificial Sequence
  Description of Artificial Sequence: Synthetic oligonucleotide
  Target: LAMA2; (+) strand; PAM type: YTN; PAM sequence: TTT
attatgtaaattacaaacat

SEQ ID NO: 409822 - DNA, 20 bp, Artificial Sequence
  Description of Artificial Sequence: Synthetic oligonucleotide
  Target: LAMA2; (+) strand; PAM type: YTN; PAM sequence: TTA
ttatgtaaattacaaacatt

SEQ ID NO: 409823 - DNA, 20 bp, Artificial Sequence
  Description of Artificial Sequence: Synthetic oligonucleotide
  Target: LAMA2; (+) strand; PAM type: YTN; PAM sequence: TTA
tgtaaattacaaacattagg

SEQ ID NO: 409824 - DNA, 20 bp, Artificial Sequence
  Description of Artificial Sequence: Synthetic oligonucleotide
  Target: LAMA2; (+) strand; PAM type: YTN; PAM sequence: TTA
caaacattaggacacatttc

SEQ ID NO: 409825 - DNA, 20 bp, Artificial Sequence
  Description of Artificial Sequence: Synthetic oligonucleotide
  Target: LAMA2; (+) strand; PAM type: YTN; PAM sequence: TTA
ggacacatttctcttaatat

SEQ ID NO: 409826 - DNA, 20 bp, Artificial Sequence
  Description of Artificial Sequence: Synthetic oligonucleotide
  Target: LAMA2; (+) strand; PAM type: YTN; PAM sequence: TTT
ctcttaatatcttcttccac

SEQ ID NO: 409827 - DNA, 20 bp, Artificial Sequence
  Description of Artificial Sequence: Synthetic oligonucleotide
  Target: LAMA2; (+) strand; PAM type: YTN; PAM sequence: TTC
tcttaatatcttcttccacg

SEQ ID NO: 409828 - DNA, 20 bp, Artificial Sequence
  Description of Artificial Sequence: Synthetic oligonucleotide
  Target: LAMA2; (+) strand; PAM type: YTN; PAM sequence: CTC
ttaatatcttcttccacgta

SEQ ID NO: 409829 - DNA, 20 bp, Artificial Sequence
  Description of Artificial Sequence: Synthetic oligonucleotide
  Target: LAMA2; (+) strand; PAM type: YTN; PAM sequence: CTT
aatatcttcttccacgtatg

SEQ ID NO: 409830 - DNA, 20 bp, Artificial Sequence
  Description of Artificial Sequence: Synthetic oligonucleotide
  Target: LAMA2; (+) strand; PAM type: YTN; PAM sequence: TTA
atatcttcttccacgtatgc

SEQ ID NO: 409831 - DNA, 20 bp, Artificial Sequence
  Description of Artificial Sequence: Synthetic oligonucleotide
  Target: LAMA2; (+) strand; PAM type: YTN; PAM sequence: CTT
cttccacgtatgcaatccaa

SEQ ID NO: 409832 - DNA, 20 bp, Artificial Sequence
  Description of Artificial Sequence: Synthetic oligonucleotide
  Target: LAMA2; (+) strand; PAM type: YTN; PAM sequence: TTC
ttccacgtatgcaatccaac

SEQ ID NO: 409833 - DNA, 20 bp, Artificial Sequence
  Description of Artificial Sequence: Synthetic oligonucleotide
  Target: LAMA2; (+) strand; PAM type: YTN; PAM sequence: CTT
ccacgtatgcaatccaactg

SEQ ID NO: 409834 - DNA, 20 bp, Artificial Sequence
  Description of Artificial Sequence: Synthetic oligonucleotide
  Target: LAMA2; (+) strand; PAM type: YTN; PAM sequence: TTC
cacgtatgcaatccaactga

SEQ ID NO: 409835 - DNA, 20 bp, Artificial Sequence
  Description of Artificial Sequence: Synthetic oligonucleotide
  Target: LAMA2; (+) strand; PAM type: YTN; PAM sequence: CTG
atatggttttaaaaaaaatc

SEQ ID NO: 409836 - DNA, 20 bp, Artificial Sequence
  Description of Artificial Sequence: Synthetic oligonucleotide
  Target: LAMA2; (+) strand; PAM type: YTN; PAM sequence: TTT
taaaaaaaatcttaaaccca

SEQ ID NO: 409837 - DNA, 20 bp, Artificial Sequence
  Description of Artificial Sequence: Synthetic oligonucleotide
  Target: LAMA2; (+) strand; PAM type: YTN; PAM sequence: TTT
aaaaaaaatcttaaacccac

SEQ ID NO: 409838 - DNA, 20 bp, Artificial Sequence
  Description of Artificial Sequence: Synthetic oligonucleotide
  Target: LAMA2; (+) strand; PAM type: YTN; PAM sequence: TTA
aaaaaaatcttaaacccaca

SEQ ID NO: 409839 - DNA, 20 bp, Artificial Sequence
  Description of Artificial Sequence: Synthetic oligonucleotide
  Target: LAMA2; (+) strand; PAM type: YTN; PAM sequence: CTT
aaacccacattccaaacaaa

SEQ ID NO: 409840 - DNA, 20 bp, Artificial Sequence
  Description of Artificial Sequence: Synthetic oligonucleotide
  Target: LAMA2; (+) strand; PAM type: YTN; PAM sequence: TTA
aacccacattccaaacaaat

SEQ ID NO: 409841 - DNA, 20 bp, Artificial Sequence
  Description of Artificial Sequence: Synthetic oligonucleotide
  Target: LAMA2; (+) strand; PAM type: YTN; PAM sequence: TTC
caaacaaataagaaataggg

SEQ ID NO: 409842 - DNA, 20 bp, Artificial Sequence
  Description of Artificial Sequence: Synthetic oligonucleotide
  Target: LAMA2; (+) strand; PAM type: YTN; PAM sequence: TTA
tgaaactctaagaatcagcc

SEQ ID NO: 409843 - DNA, 20 bp, Artificial Sequence
  Description of Artificial Sequence: Synthetic oligonucleotide
  Target: LAMA2; (+) strand; PAM type: YTN; PAM sequence: CTC
taagaatcagccactgaaac

SEQ ID NO: 409844 - DNA, 20 bp, Artificial Sequence
  Description of Artificial Sequence: Synthetic oligonucleotide
  Target: LAMA2; (+) strand; PAM type: YTN; PAM sequence: CTA
agaatcagccactgaaactg

SEQ ID NO: 409845 - DNA, 20 bp, Artificial Sequence
  Description of Artificial Sequence: Synthetic oligonucleotide
  Target: LAMA2; (+) strand; PAM type: YTN; PAM sequence: CTG
aaactgtaaaaaaaaaaaat

SEQ ID NO: 409846 - DNA, 20 bp, Artificial Sequence
  Description of Artificial Sequence: Synthetic oligonucleotide
  Target: LAMA2; (+) strand; PAM type: YTN; PAM sequence: CTG
taaaaaaaaaaaataaagct

SEQ ID NO: 409847 - DNA, 20 bp, Artificial Sequence
  Description of Artificial Sequence: Synthetic oligonucleotide
  Target: LAMA2; (+) strand; PAM type: YTN; PAM sequence: CTG
acctattacaatactaaagt

SEQ ID NO: 409848 - DNA, 20 bp, Artificial Sequence
  Description of Artificial Sequence: Synthetic oligonucleotide
  Target: LAMA2; (+) strand; PAM type: YTN; PAM sequence: CTA
ttacaatactaaagtaatac

SEQ ID NO: 409849 - DNA, 20 bp, Artificial Sequence
  Description of Artificial Sequence: Synthetic oligonucleotide
  Target: LAMA2; (+) strand; PAM type: YTN; PAM sequence: TTA
caatactaaagtaatacaaa

SEQ ID NO: 409850 - DNA, 20 bp, Artificial Sequence
  Description of Artificial Sequence: Synthetic oligonucleotide
  Target: LAMA2; (+) strand; PAM type: YTN; PAM sequence: CTA
aagtaatacaaagtttaatg

SEQ ID NO: 409851 - DNA, 20 bp, Artificial Sequence
  Description of Artificial Sequence: Synthetic oligonucleotide
  Target: LAMA2; (+) strand; PAM type: YTN; PAM sequence: TTT
aatgtacctttttgcacata

SEQ ID NO: 409852 - DNA, 20 bp, Artificial Sequence
  Description of Artificial Sequence: Synthetic oligonucleotide
  Target: LAMA2; (+) strand; PAM type: YTN; PAM sequence: TTA
atgtacctttttgcacatag

SEQ ID NO: 409853 - DNA, 20 bp, Artificial Sequence
  Description of Artificial Sequence: Synthetic oligonucleotide
  Target: LAMA2; (+) strand; PAM type: YTN; PAM sequence: CTT
tttgcacatagcaggcctca

SEQ ID NO: 409854 - DNA, 20 bp, Artificial Sequence
  Description of Artificial Sequence: Synthetic oligonucleotide
  Target: LAMA2; (+) strand; PAM type: YTN; PAM sequence: TTT
ttgcacatagcaggcctcag

SEQ ID NO: 409855 - DNA, 20 bp, Artificial Sequence
  Description of Artificial Sequence: Synthetic oligonucleotide
  Target: LAMA2; (+) strand; PAM type: YTN; PAM sequence: TTT
tgcacatagcaggcctcagt

SEQ ID NO: 409856 - DNA, 20 bp, Artificial Sequence
  Description of Artificial Sequence: Synthetic oligonucleotide
  Target: LAMA2; (+) strand; PAM type: YTN; PAM sequence: TTT
gcacatagcaggcctcagta

SEQ ID NO: 409857 - DNA, 20 bp, Artificial Sequence
  Description of Artificial Sequence: Synthetic oligonucleotide
  Target: LAMA2; (+) strand; PAM type: YTN; PAM sequence: TTG
cacatagcaggcctcagtaa

SEQ ID NO: 409858 - DNA, 20 bp, Artificial Sequence
  Description of Artificial Sequence: Synthetic oligonucleotide
  Target: LAMA2; (+) strand; PAM type: YTN; PAM sequence: CTC
agtaaaaagctgttaaataa

SEQ ID NO: 409859 - DNA, 20 bp, Artificial Sequence
  Description of Artificial Sequence: Synthetic oligonucleotide
  Target: LAMA2; (+) strand; PAM type: YTN; PAM sequence: CTG
ttaaataaatactttttaaa

SEQ ID NO: 409860 - DNA, 20 bp, Artificial Sequence
  Description of Artificial Sequence: Synthetic oligonucleotide
  Target: LAMA2; (+) strand; PAM type: YTN; PAM sequence: TTA
aataaatactttttaaaaat

SEQ ID NO: 409861 - DNA, 20 bp, Artificial Sequence
  Description of Artificial Sequence: Synthetic oligonucleotide
  Target: LAMA2; (+) strand; PAM type: YTN; PAM sequence: CTT
tttaaaaatggaaaacacac

SEQ ID NO: 409862 - DNA, 20 bp, Artificial Sequence
  Description of Artificial Sequence: Synthetic oligonucleotide
  Target: LAMA2; (+) strand; PAM type: YTN; PAM sequence: TTT
ttaaaaatggaaaacacacc

SEQ ID NO: 409863 - DNA, 20 bp, Artificial Sequence
  Description of Artificial Sequence: Synthetic oligonucleotide
  Target: LAMA2; (+) strand; PAM type: YTN; PAM sequence: TTT
taaaaatggaaaacacacca

SEQ ID NO: 409864 - DNA, 20 bp, Artificial Sequence
  Description of Artificial Sequence: Synthetic oligonucleotide
  Target: LAMA2; (+) strand; PAM type: YTN; PAM sequence: TTT
aaaaatggaaaacacaccag

SEQ ID NO: 409865 - DNA, 20 bp, Artificial Sequence
  Description of Artificial Sequence: Synthetic oligonucleotide
  Target: LAMA2; (+) strand; PAM type: YTN; PAM sequence: TTA
aaaatggaaaacacaccaga

SEQ ID NO: 409866 - DNA, 20 bp, Artificial Sequence
  Description of Artificial Sequence: Synthetic oligonucleotide
  Target: LAMA2; (+) strand; PAM type: YTN; PAM sequence: TTG
gcaatgtccttctcaataaa

SEQ ID NO: 409867 - DNA, 20 bp, Artificial Sequence
  Description of Artificial Sequence: Synthetic oligonucleotide
  Target: LAMA2; (+) strand; PAM type: YTN; PAM sequence: CTT
ctcaataaaaactaaagaaa

SEQ ID NO: 409868 - DNA, 20 bp, Artificial Sequence
  Description of Artificial Sequence: Synthetic oligonucleotide
  Target: LAMA2; (+) strand; PAM type: YTN; PAM sequence: TTC
tcaataaaaactaaagaaat

SEQ ID NO: 409869 - DNA, 20 bp, Artificial Sequence
  Description of Artificial Sequence: Synthetic oligonucleotide
  Target: LAMA2; (+) strand; PAM type: YTN; PAM sequence: CTC
aataaaaactaaagaaatga

SEQ ID NO: 409870 - DNA, 20 bp, Artificial Sequence
  Description of Artificial Sequence: Synthetic oligonucleotide
  Target: LAMA2; (+) strand; PAM type: YTN; PAM sequence: CTA
aagaaatgatctagatttga

SEQ ID NO: 409871 - DNA, 20 bp, Artificial Sequence
  Description of Artificial Sequence: Synthetic oligonucleotide
  Target: LAMA2; (+) strand; PAM type: YTN; PAM sequence: CTA
gatttgatgttcctaaaagg

SEQ ID NO: 409872 - DNA, 20 bp, Artificial Sequence
  Description of Artificial Sequence: Synthetic oligonucleotide
  Target: LAMA2; (+) strand; PAM type: YTN; PAM sequence: TTT
gatgttcctaaaaggtaaaa

SEQ ID NO: 409873 - DNA, 20 bp, Artificial Sequence
  Description of Artificial Sequence: Synthetic oligonucleotide
  Target: LAMA2; (+) strand; PAM type: YTN; PAM sequence: TTG
atgttcctaaaaggtaaaat

SEQ ID NO: 409874 - DNA, 20 bp, Artificial Sequence
  Description of Artificial Sequence: Synthetic oligonucleotide
  Target: LAMA2; (+) strand; PAM type: YTN; PAM sequence: TTC
ctaaaaggtaaaataggagc

SEQ ID NO: 409875 - DNA, 20 bp, Artificial Sequence
  Description of Artificial Sequence: Synthetic oligonucleotide
  Target: LAMA2; (+) strand; PAM type: YTN; PAM sequence: CTA
aaaggtaaaataggagcagg

SEQ ID NO: 409876 - DNA, 20 bp, Artificial Sequence
  Description of Artificial Sequence: Synthetic oligonucleotide
  Target: LAMA2; (+) strand; PAM type: YTN; PAM sequence: TTT
agctgtagttttctagcaat

SEQ ID NO: 409877 - DNA, 20 bp, Artificial Sequence
  Description of Artificial Sequence: Synthetic oligonucleotide
  Target: LAMA2; (+) strand; PAM type: YTN; PAM sequence: TTA
gctgtagttttctagcaatg

SEQ ID NO: 409878 - DNA, 20 bp, Artificial Sequence
  Description of Artificial Sequence: Synthetic oligonucleotide
  Target: LAMA2; (+) strand; PAM type: YTN; PAM sequence: CTG
tagttttctagcaatgccct

SEQ ID NO: 409879 - DNA, 20 bp, Artificial Sequence
  Description of Artificial Sequence: Synthetic oligonucleotide
  Target: LAMA2; (+) strand; PAM type: YTN; PAM sequence: TTT
tctagcaatgccctttttaa

SEQ ID NO: 409880 - DNA, 20 bp, Artificial Sequence
  Description of Artificial Sequence: Synthetic oligonucleotide
  Target: LAMA2; (+) strand; PAM type: YTN; PAM sequence: TTT
ctagcaatgccctttttaag

SEQ ID NO: 409881 - DNA, 20 bp, Artificial Sequence
  Description of Artificial Sequence: Synthetic oligonucleotide
  Target: LAMA2; (+) strand; PAM type: YTN; PAM sequence: TTC
tagcaatgccctttttaagt

SEQ ID NO: 409882 - DNA, 20 bp, Artificial Sequence
  Description of Artificial Sequence: Synthetic oligonucleotide
  Target: LAMA2; (+) strand; PAM type: YTN; PAM sequence: CTA
gcaatgccctttttaagtaa

SEQ ID NO: 409883 - DNA, 20 bp, Artificial Sequence
  Description of Artificial Sequence: Synthetic oligonucleotide
  Target: LAMA2; (+) strand; PAM type: YTN; PAM sequence: CTT
tttaagtaatacagcctcag

SEQ ID NO: 409884 - DNA, 20 bp, Artificial Sequence
  Description of Artificial Sequence: Synthetic oligonucleotide
  Target: LAMA2; (+) strand; PAM type: YTN; PAM sequence: TTT
ttaagtaatacagcctcagg

SEQ ID NO: 409885 - DNA, 20 bp, Artificial Sequence
  Description of Artificial Sequence: Synthetic oligonucleotide
  Target: LAMA2; (+) strand; PAM type: YTN; PAM sequence: TTT
taagtaatacagcctcaggg

SEQ ID NO: 409886 - DNA, 20 bp, Artificial Sequence
  Description of Artificial Sequence: Synthetic oligonucleotide
  Target: LAMA2; (+) strand; PAM type: YTN; PAM sequence: TTT
aagtaatacagcctcagggc

SEQ ID NO: 409887 - DNA, 20 bp, Artificial Sequence
  Description of Artificial Sequence: Synthetic oligonucleotide
  Target: LAMA2; (+) strand; PAM type: YTN; PAM sequence: TTA
agtaatacagcctcagggca

SEQ ID NO: 409888 - DNA, 20 bp, Artificial Sequence
  Description of Artificial Sequence: Synthetic oligonucleotide
  Target: LAMA2; (+) strand; PAM type: YTN; PAM sequence: CTC
agggcaatcccttaattaat

SEQ ID NO: 409889 - DNA, 20 bp, Artificial Sequence
  Description of Artificial Sequence: Synthetic oligonucleotide
  Target: LAMA2; (+) strand; PAM type: YTN; PAM sequence: CTT
aattaatattttccgctgtt

SEQ ID NO: 409890 - DNA, 20 bp, Artificial Sequence
  Description of Artificial Sequence: Synthetic oligonucleotide
  Target: LAMA2; (+) strand; PAM type: YTN; PAM sequence: TTA
attaatattttccgctgttt

SEQ ID NO: 409891 - DNA, 20 bp, Artificial Sequence
  Description of Artificial Sequence: Synthetic oligonucleotide
  Target: LAMA2; (+) strand; PAM type: YTN; PAM sequence: TTA
atattttccgctgtttgaag

SEQ ID NO: 409892 - DNA, 20 bp, Artificial Sequence
  Description of Artificial Sequence: Synthetic oligonucleotide
  Target: LAMA2; (+) strand; PAM type: YTN; PAM sequence: TTT
tccgctgtttgaagtaggta

SEQ ID NO: 409893 - DNA, 20 bp, Artificial Sequence
  Description of Artificial Sequence: Synthetic oligonucleotide
  Target: LAMA2; (+) strand; PAM type: YTN; PAM sequence: TTT
ccgctgtttgaagtaggtat

SEQ ID NO: 409894 - DNA, 20 bp, Artificial Sequence
  Description of Artificial Sequence: Synthetic oligonucleotide
  Target: LAMA2; (+) strand; PAM type: YTN; PAM sequence: TTC
cgctgtttgaagtaggtatt

SEQ ID NO: 409895 - DNA, 20 bp, Artificial Sequence
  Description of Artificial Sequence: Synthetic oligonucleotide
  Target: LAMA2; (+) strand; PAM type: YTN; PAM sequence: CTG
tttgaagtaggtatttttat

SEQ ID NO: 409896 - DNA, 20 bp, Artificial Sequence
  Description of Artificial Sequence: Synthetic oligonucleotide
  Target: LAMA2; (+) strand; PAM type: YTN; PAM sequence: TTT
gaagtaggtatttttatctc

SEQ ID NO: 409897 - DNA, 20 bp, Artificial Sequence
  Description of Artificial Sequence: Synthetic oligonucleotide
  Target: LAMA2; (+) strand; PAM type: YTN; PAM sequence: TTG
aagtaggtatttttatctcc

SEQ ID NO: 409898 - DNA, 20 bp, Artificial Sequence
  Description of Artificial Sequence: Synthetic oligonucleotide
  Target: LAMA2; (+) strand; PAM type: YTN; PAM sequence: TTT
ttatctccatcttataaatg

SEQ ID NO: 409899 - DNA, 20 bp, Artificial Sequence
  Description of Artificial Sequence: Synthetic oligonucleotide
  Target: LAMA2; (+) strand; PAM type: YTN; PAM sequence: TTT
tatctccatcttataaatga

SEQ ID NO: 409900 - DNA, 20 bp, Artificial Sequence
  Description of Artificial Sequence: Synthetic oligonucleotide
  Target: LAMA2; (+) strand; PAM type: YTN; PAM sequence: TTT
atctccatcttataaatgaa

SEQ ID NO: 409901 - DNA, 20 bp, Artificial Sequence
  Description of Artificial Sequence: Synthetic oligonucleotide
  Target: LAMA2; (+) strand; PAM type: YTN; PAM sequence: TTA
tctccatcttataaatgaat

SEQ ID NO: 409902 - DNA, 20 bp, Artificial Sequence
  Description of Artificial Sequence: Synthetic oligonucleotide
  Target: LAMA2; (+) strand; PAM type: YTN; PAM sequence: CTC
catcttataaatgaatgaaa

SEQ ID NO: 409903 - DNA, 20 bp, Artificial Sequence
  Description of Artificial Sequence: Synthetic oligonucleotide
  Target: LAMA2; (+) strand; PAM type: YTN; PAM sequence: CTT
ataaatgaatgaaatggacc

SEQ ID NO: 409904 - DNA, 20 bp, Artificial Sequence
  Description of Artificial Sequence: Synthetic oligonucleotide
  Target: LAMA2; (+) strand; PAM type: YTN; PAM sequence: TTA
taaatgaatgaaatggacct

SEQ ID NO: 409905 - DNA, 20 bp, Artificial Sequence
  Description of Artificial Sequence: Synthetic oligonucleotide
  Target: LAMA2; (+) strand; PAM type: YTN; PAM sequence: CTG
agcatgattaaataacttgc

SEQ ID NO: 409906 - DNA, 20 bp, Artificial Sequence
  Description of Artificial Sequence: Synthetic oligonucleotide
  Target: LAMA2; (+) strand; PAM type: YTN; PAM sequence: TTA
aataacttgcccaaggtcac

SEQ ID NO: 409907 - DNA, 20 bp, Artificial Sequence
  Description of Artificial Sequence: Synthetic oligonucleotide
  Target: LAMA2; (+) strand; PAM type: YTN; PAM sequence: CTT
gcccaaggtcacacagctag

SEQ ID NO: 409908 - DNA, 20 bp, Artificial Sequence
  Description of Artificial Sequence: Synthetic oligonucleotide
  Target: LAMA2; (+) strand; PAM type: YTN; PAM sequence: TTG
cccaaggtcacacagctagt

SEQ ID NO: 409909 - DNA, 20 bp, Artificial Sequence
  Description of Artificial Sequence: Synthetic oligonucleotide
  Target: LAMA2; (+) strand; PAM type: YTN; PAM sequence: CTA
gtaagcttccacactagtac

SEQ ID NO: 409910 - DNA, 20 bp, Artificial Sequence
  Description of Artificial Sequence: Synthetic oligonucleotide
  Target: LAMA2; (+) strand; PAM type: YTN; PAM sequence: CTT
ccacactagtacttaattcc

SEQ ID NO: 409911 - DNA, 20 bp, Artificial Sequence
  Description of Artificial Sequence: Synthetic oligonucleotide
  Target: LAMA2; (+) strand; PAM type: YTN; PAM sequence: TTC
cacactagtacttaattcca

SEQ ID NO: 409912 - DNA, 20 bp, Artificial Sequence
  Description of Artificial Sequence: Synthetic oligonucleotide
  Target: LAMA2; (+) strand; PAM type: YTN; PAM sequence: CTA
gtacttaattccagtatgtt

SEQ ID NO: 409913 - DNA, 20 bp, Artificial Sequence
  Description of Artificial Sequence: Synthetic oligonucleotide
  Target: LAMA2; (+) strand; PAM type: YTN; PAM sequence: CTT
aattccagtatgttcctcct

SEQ ID NO: 409914 - DNA, 20 bp, Artificial Sequence
  Description of Artificial Sequence: Synthetic oligonucleotide
  Target: LAMA2; (+) strand; PAM type: YTN; PAM sequence: TTA
attccagtatgttcctcctg

SEQ ID NO: 409915 - DNA, 20 bp, Artificial Sequence
  Description of Artificial Sequence: Synthetic oligonucleotide
  Target: LAMA2; (+) strand; PAM type: YTN; PAM sequence: TTC
cagtatgttcctcctgaaag

SEQ ID NO: 409916 - DNA, 20 bp, Artificial Sequence
  Description of Artificial Sequence: Synthetic oligonucleotide
  Target: LAMA2; (+) strand; PAM type: YTN; PAM sequence: TTC
ctcctgaaagcccacactca

SEQ ID NO: 409917 - DNA, 20 bp, Artificial Sequence
  Description of Artificial Sequence: Synthetic oligonucleotide
  Target: LAMA2; (+) strand; PAM type: YTN; PAM sequence: CTC
ctgaaagcccacactcattc

SEQ ID NO: 409918 - DNA, 20 bp, Artificial Sequence
  Description of Artificial Sequence: Synthetic oligonucleotide
  Target: LAMA2; (+) strand; PAM type: YTN; PAM sequence: CTG
aaagcccacactcattctcc

SEQ ID NO: 409919 - DNA, 20 bp, Artificial Sequence
  Description of Artificial Sequence: Synthetic oligonucleotide
  Target: LAMA2; (+) strand; PAM type: YTN; PAM sequence: CTC
attctccatcaccaccctgt

SEQ ID NO: 409920 - DNA, 20 bp, Artificial Sequence
  Description of Artificial Sequence: Synthetic oligonucleotide
  Target: LAMA2; (+) strand; PAM type: YTN; PAM sequence: TTC
tccatcaccaccctgtgaat

SEQ ID NO: 409921 - DNA, 20 bp, Artificial Sequence
  Description of Artificial Sequence: Synthetic oligonucleotide
  Target: LAMA2; (+) strand; PAM type: YTN; PAM sequence: CTC
catcaccaccctgtgaattg

SEQ ID NO: 409922 - DNA, 20 bp, Artificial Sequence
  Description of Artificial Sequence: Synthetic oligonucleotide
  Target: LAMA2; (+) strand; PAM type: YTN; PAM sequence: CTG
tgaattggtttaaaaaaaat

SEQ ID NO: 409923 - DNA, 20 bp, Artificial Sequence
  Description of Artificial Sequence: Synthetic oligonucleotide
  Target: LAMA2; (+) strand; PAM type: YTN; PAM sequence: TTG
gtttaaaaaaaataagggtc

SEQ ID NO: 409924 - DNA, 20 bp, Artificial Sequence
  Description of Artificial Sequence: Synthetic oligonucleotide
  Target: LAMA2; (+) strand; PAM type: YTN; PAM sequence: TTT
aaaaaaaataagggtcacta

SEQ ID NO: 409925 - DNA, 20 bp, Artificial Sequence
  Description of Artificial Sequence: Synthetic oligonucleotide
  Target: LAMA2; (+) strand; PAM type: YTN; PAM sequence: TTA
aaaaaaataagggtcactat

SEQ ID NO: 409926 - DNA, 20 bp, Artificial Sequence
  Description of Artificial Sequence: Synthetic oligonucleotide
  Target: LAMA2; (+) strand; PAM type: YTN; PAM sequence: CTA
tgatggtccttgtggcagaa

SEQ ID NO: 409927 - DNA, 20 bp, Artificial Sequence
  Description of Artificial Sequence: Synthetic oligonucleotide
  Target: LAMA2; (+) strand; PAM type: YTN; PAM sequence: CTT
gtggcagaaccacactacag

SEQ ID NO: 409928 - DNA, 20 bp, Artificial Sequence
  Description of Artificial Sequence: Synthetic oligonucleotide
  Target: LAMA2; (+) strand; PAM type: YTN; PAM sequence: TTG
tggcagaaccacactacaga

SEQ ID NO: 409929 - DNA, 20 bp, Artificial Sequence
  Description of Artificial Sequence: Synthetic oligonucleotide
  Target: LAMA2; (+) strand; PAM type: YTN; PAM sequence: CTA
cagagagaggctacaccaga

SEQ ID NO: 409930 - DNA, 20 bp, Artificial Sequence
  Description of Artificial Sequence: Synthetic oligonucleotide
  Target: LAMA2; (+) strand; PAM type: YTN; PAM sequence: CTA
caccagaaagaggaaggcct

SEQ ID NO: 409931 - DNA, 20 bp, Artificial Sequence
  Description of Artificial Sequence: Synthetic oligonucleotide
  Target: LAMA2; (+) strand; PAM type: YTN; PAM sequence: CTC
tagctttttaaaattctaat

SEQ ID NO: 409932 - DNA, 20 bp, Artificial Sequence
  Description of Artificial Sequence: Synthetic oligonucleotide
  Target: LAMA2; (+) strand; PAM type: YTN; PAM sequence: CTA
gctttttaaaattctaatca

SEQ ID NO: 409933 - DNA, 20 bp, Artificial Sequence
  Description of Artificial Sequence: Synthetic oligonucleotide
  Target: LAMA2; (+) strand; PAM type: YTN; PAM sequence: CTT
tttaaaattctaatcaagaa

SEQ ID NO: 409934 - DNA, 20 bp, Artificial Sequence
  Description of Artificial Sequence: Synthetic oligonucleotide
  Target: LAMA2; (+) strand; PAM type: YTN; PAM sequence: TTT
ttaaaattctaatcaagaac

SEQ ID NO: 409935 - DNA, 20 bp, Artificial Sequence
  Description of Artificial Sequence: Synthetic oligonucleotide
  Target: LAMA2; (+) strand; PAM type: YTN; PAM sequence: TTT
taaaattctaatcaagaaca

SEQ ID NO: 409936 - DNA, 20 bp, Artificial Sequence
  Description of Artificial Sequence: Synthetic oligonucleotide
  Target: LAMA2; (+) strand; PAM type: YTN; PAM sequence: TTT
aaaattctaatcaagaacag

SEQ ID NO: 409937 - DNA, 20 bp, Artificial Sequence
  Description of Artificial Sequence: Synthetic oligonucleotide
  Target: LAMA2; (+) strand; PAM type: YTN; PAM sequence: TTA
aaattctaatcaagaacaga

SEQ ID NO: 409938 - DNA, 20 bp, Artificial Sequence
  Description of Artificial Sequence: Synthetic oligonucleotide
  Target: LAMA2; (+) strand; PAM type: YTN; PAM sequence: TTC
taatcaagaacagagattta

SEQ ID NO: 409939 - DNA, 20 bp, Artificial Sequence
  Description of Artificial Sequence: Synthetic oligonucleotide
  Target: LAMA2; (+) strand; PAM type: YTN; PAM sequence: CTA
atcaagaacagagatttact

SEQ ID NO: 409940 - DNA, 20 bp, Artificial Sequence
  Description of Artificial Sequence: Synthetic oligonucleotide
  Target: LAMA2; (+) strand; PAM type: YTN; PAM sequence: TTT
actctccttggacaatcttt

SEQ ID NO: 409941 - DNA, 20 bp, Artificial Sequence
  Description of Artificial Sequence: Synthetic oligonucleotide
  Target: LAMA2; (+) strand; PAM type: YTN; PAM sequence: TTA
ctctccttggacaatcttta

SEQ ID NO: 409942 - DNA, 20 bp, Artificial Sequence
  Description of Artificial Sequence: Synthetic oligonucleotide
  Target: LAMA2; (+) strand; PAM type: YTN; PAM sequence: CTC
tccttggacaatctttaaca

SEQ ID NO: 409943 - DNA, 20 bp, Artificial Sequence
  Description of Artificial Sequence: Synthetic oligonucleotide
  Target: LAMA2; (+) strand; PAM type: YTN; PAM sequence: CTC
cttggacaatctttaacaga

SEQ ID NO: 409944 - DNA, 20 bp, Artificial Sequence
  Description of Artificial Sequence: Synthetic oligonucleotide
  Target: LAMA2; (+) strand; PAM type: YTN; PAM sequence: CTT
ggacaatctttaacagaggc

SEQ ID NO: 409945 - DNA, 20 bp, Artificial Sequence
  Description of Artificial Sequence: Synthetic oligonucleotide
  Target: LAMA2; (+) strand; PAM type: YTN; PAM sequence: TTG
gacaatctttaacagaggct

SEQ ID NO: 409946 - DNA, 20 bp, Artificial Sequence
  Description of Artificial Sequence: Synthetic oligonucleotide
  Target: LAMA2; (+) strand; PAM type: YTN; PAM sequence: CTT
taacagaggcttatatcctt

SEQ ID NO: 409947 - DNA, 20 bp, Artificial Sequence
  Description of Artificial Sequence: Synthetic oligonucleotide
  Target: LAMA2; (+) strand; PAM type: YTN; PAM sequence: TTT
aacagaggcttatatccttc

SEQ ID NO: 409948 - DNA, 20 bp, Artificial Sequence
  Description of Artificial Sequence: Synthetic oligonucleotide
  Target: LAMA2; (+) strand; PAM type: YTN; PAM sequence: TTA
acagaggcttatatccttca

SEQ ID NO: 409949 - DNA, 20 bp, Artificial Sequence
  Description of Artificial Sequence: Synthetic oligonucleotide
  Target: LAMA2; (+) strand; PAM type: YTN; PAM sequence: CTT
atatccttcattaaaacctt

SEQ ID NO: 409950 - DNA, 20 bp, Artificial Sequence
  Description of Artificial Sequence: Synthetic oligonucleotide
  Target: LAMA2; (+) strand; PAM type: YTN; PAM sequence: TTA
tatccttcattaaaacctta

SEQ ID NO: 409951 - DNA, 20 bp, Artificial Sequence
  Description of Artificial Sequence: Synthetic oligonucleotide
  Target: LAMA2; (+) strand; PAM type: YTN; PAM sequence: CTT
cattaaaaccttagaagccc

SEQ ID NO: 409952 - DNA, 20 bp, Artificial Sequence
  Description of Artificial Sequence: Synthetic oligonucleotide
  Target: LAMA2; (+) strand; PAM type: YTN; PAM sequence: TTC
attaaaaccttagaagccct

SEQ ID NO: 409953 - DNA, 20 bp, Artificial Sequence
  Description of Artificial Sequence: Synthetic oligonucleotide
  Target: LAMA2; (+) strand; PAM type: YTN; PAM sequence: TTA
aaaccttagaagccctgtga

SEQ ID NO: 409954 - DNA, 20 bp, Artificial Sequence
  Description of Artificial Sequence: Synthetic oligonucleotide
  Target: LAMA2; (+) strand; PAM type: YTN; PAM sequence: CTT
agaagccctgtgatatcatg

SEQ ID NO: 409955 - DNA, 20 bp, Artificial Sequence
  Description of Artificial Sequence: Synthetic oligonucleotide
  Target: LAMA2; (+) strand; PAM type: YTN; PAM sequence: TTA
gaagccctgtgatatcatgt

SEQ ID NO: 409956 - DNA, 20 bp, Artificial Sequence
  Description of Artificial Sequence: Synthetic oligonucleotide
  Target: LAMA2; (+) strand; PAM type: YTN; PAM sequence: CTG
tgatatcatgttgctaagaa

SEQ ID NO: 409957 - DNA, 20 bp, Artificial Sequence
  Description of Artificial Sequence: Synthetic oligonucleotide
  Target: LAMA2; (+) strand; PAM type: YTN; PAM sequence: TTG
ctaagaagaggctgctttca

SEQ ID NO: 409958 - DNA, 20 bp, Artificial Sequence
  Description of Artificial Sequence: Synthetic oligonucleotide
  Target: LAMA2; (+) strand; PAM type: YTN; PAM sequence: CTA
agaagaggctgctttcagct

SEQ ID NO: 409959 - DNA, 20 bp, Artificial Sequence
  Description of Artificial Sequence: Synthetic oligonucleotide
  Target: LAMA2; (+) strand; PAM type: YTN; PAM sequence: CTG
ctttcagctaaaggggaaaa

SEQ ID NO: 409960 - DNA, 20 bp, Artificial Sequence
  Description of Artificial Sequence: Synthetic oligonucleotide
  Target: LAMA2; (+) strand; PAM type: YTN; PAM sequence: CTT
tcagctaaaggggaaaaaga

SEQ ID NO: 409961 - DNA, 20 bp, Artificial Sequence
  Description of Artificial Sequence: Synthetic oligonucleotide
  Target: LAMA2; (+) strand; PAM type: YTN; PAM sequence: TTT
cagctaaaggggaaaaagag

SEQ ID NO: 409962 - DNA, 20 bp, Artificial Sequence
  Description of Artificial Sequence: Synthetic oligonucleotide
  Target: LAMA2; (+) strand; PAM type: YTN; PAM sequence: TTC
agctaaaggggaaaaagagt

SEQ ID NO: 409963 - DNA, 20 bp, Artificial Sequence
  Description of Artificial Sequence: Synthetic oligonucleotide
  Target: LAMA2; (+) strand; PAM type: YTN; PAM sequence: CTA
aaggggaaaaagagtgtagg

SEQ ID NO: 409964 - DNA, 20 bp, Artificial Sequence
  Description of Artificial Sequence: Synthetic oligonucleotide
  Target: LAMA2; (+) strand; PAM type: YTN; PAM sequence: CTT
ctcagtgagtcacacatacc

SEQ ID NO: 409965 - DNA, 20 bp, Artificial Sequence
  Description of Artificial Sequence: Synthetic oligonucleotide
  Target: LAMA2; (+) strand; PAM type: YTN; PAM sequence: TTC
tcagtgagtcacacataccc

SEQ ID NO: 409966 - DNA, 20 bp, Artificial Sequence
  Description of Artificial Sequence: Synthetic oligonucleotide
  Target: LAMA2; (+) strand; PAM type: YTN; PAM sequence: CTC
agtgagtcacacatacccgg

SEQ ID NO: 409967 - DNA, 20 bp, Artificial Sequence
  Description of Artificial Sequence: Synthetic oligonucleotide
  Target: LAMA2; (+) strand; PAM type: YTN; PAM sequence: TTT
tctgaaattctcgtctcagg

SEQ ID NO: 409968 - DNA, 20 bp, Artificial Sequence
  Description of Artificial Sequence: Synthetic oligonucleotide
  Target: LAMA2; (+) strand; PAM type: YTN; PAM sequence: TTT
ctgaaattctcgtctcagga

SEQ ID NO: 409969 - DNA, 20 bp, Artificial Sequence
  Description of Artificial Sequence: Synthetic oligonucleotide
  Target: LAMA2; (+) strand; PAM type: YTN; PAM sequence: TTC
tgaaattctcgtctcaggaa

SEQ ID NO: 409970 - DNA, 20 bp, Artificial Sequence
  Description of Artificial Sequence: Synthetic oligonucleotide
  Target: LAMA2; (+) strand; PAM type: YTN; PAM sequence: CTG
aaattctcgtctcaggaaac

SEQ ID NO: 409971 - DNA, 20 bp, Artificial Sequence
  Description of Artificial Sequence: Synthetic oligonucleotide
  Target: LAMA2; (+) strand; PAM type: YTN; PAM sequence: TTC
tcgtctcaggaaaccaccga

SEQ ID NO: 409972 - DNA, 20 bp, Artificial Sequence
  Description of Artificial Sequence: Synthetic oligonucleotide
  Target: LAMA2; (+) strand; PAM type: YTN; PAM sequence: CTC
gtctcaggaaaccaccgaca

SEQ ID NO: 409973 - DNA, 20 bp, Artificial Sequence
  Description of Artificial Sequence: Synthetic oligonucleotide
  Target: LAMA2; (+) strand; PAM type: YTN; PAM sequence: CTC
aggaaaccaccgacactctt

SEQ ID NO: 409974 - DNA, 20 bp, Artificial Sequence
  Description of Artificial Sequence: Synthetic oligonucleotide
  Target: LAMA2; (+) strand; PAM type: YTN; PAM sequence: CTC
ttagcaaggaagctgaacct

SEQ ID NO: 409975 - DNA, 20 bp, Artificial Sequence
  Description of Artificial Sequence: Synthetic oligonucleotide
  Target: LAMA2; (+) strand; PAM type: YTN; PAM sequence: CTT
agcaaggaagctgaacctcc

SEQ ID NO: 409976 - DNA, 20 bp, Artificial Sequence
  Description of Artificial Sequence: Synthetic oligonucleotide
  Target: LAMA2; (+) strand; PAM type: YTN; PAM sequence: TTA
gcaaggaagctgaacctcct

SEQ ID NO: 409977 - DNA, 20 bp, Artificial Sequence
  Description of Artificial Sequence: Synthetic oligonucleotide
  Target: LAMA2; (+) strand; PAM type: YTN; PAM sequence: CTG
aacctcctgggttttgccaa

SEQ ID NO: 409978 - DNA, 20 bp, Artificial Sequence
  Description of Artificial Sequence: Synthetic oligonucleotide
  Target: LAMA2; (+) strand; PAM type: YTN; PAM sequence: CTC
ctgggttttgccaacacatt

SEQ ID NO: 409979 - DNA, 20 bp, Artificial Sequence
  Description of Artificial Sequence: Synthetic oligonucleotide
  Target: LAMA2; (+) strand; PAM type: YTN; PAM sequence: CTG
ggttttgccaacacattttt

SEQ ID NO: 409980 - DNA, 20 bp, Artificial Sequence
  Description of Artificial Sequence: Synthetic oligonucleotide
  Target: LAMA2; (+) strand; PAM type: YTN; PAM sequence: TTT
tgccaacacatttttccata

SEQ ID NO: 409981 - DNA, 20 bp, Artificial Sequence
  Description of Artificial Sequence: Synthetic oligonucleotide
  Target: LAMA2; (+) strand; PAM type: YTN; PAM sequence: TTT
gccaacacatttttccatag

SEQ ID NO: 409982 - DNA, 20 bp, Artificial Sequence
  Description of Artificial Sequence: Synthetic oligonucleotide
  Target: LAMA2; (+) strand; PAM type: YTN; PAM sequence: TTG
ccaacacatttttccatagt

SEQ ID NO: 409983 - DNA, 20 bp, Artificial Sequence
  Description of Artificial Sequence: Synthetic oligonucleotide
  Target: LAMA2; (+) strand; PAM type: YTN; PAM sequence: TTT
ttccatagtttggtaaagaa

SEQ ID NO: 409984 - DNA, 20 bp, Artificial Sequence
  Description of Artificial Sequence: Synthetic oligonucleotide
  Target: LAMA2; (+) strand; PAM type: YTN; PAM sequence: TTT
tccatagtttggtaaagaaa

SEQ ID NO: 409985 - DNA, 20 bp, Artificial Sequence
  Description of Artificial Sequence: Synthetic oligonucleotide
  Target: LAMA2; (+) strand; PAM type: YTN; PAM sequence: TTT
ccatagtttggtaaagaaag

SEQ ID NO: 409986 - DNA, 20 bp, Artificial Sequence
  Description of Artificial Sequence: Synthetic oligonucleotide
  Target: LAMA2; (+) strand; PAM type: YTN; PAM sequence: TTC
catagtttggtaaagaaaga

SEQ ID NO: 409987 - DNA, 20 bp, Artificial Sequence
  Description of Artificial Sequence: Synthetic oligonucleotide
  Target: LAMA2; (+) strand; PAM type: YTN; PAM sequence: TTT
ggtaaagaaagaaacctcaa

SEQ ID NO: 409988 - DNA, 20 bp, Artificial Sequence
  Description of Artificial Sequence: Synthetic oligonucleotide
  Target: LAMA2; (+) strand; PAM type: YTN; PAM sequence: TTG
gtaaagaaagaaacctcaaa

SEQ ID NO: 409989 - DNA, 20 bp, Artificial Sequence
  Description of Artificial Sequence: Synthetic oligonucleotide
  Target: LAMA2; (+) strand; PAM type: YTN; PAM sequence: CTC
aaaagtatgtcatttccccc

SEQ ID NO: 409990 - DNA, 20 bp, Artificial Sequence
  Description of Artificial Sequence: Synthetic oligonucleotide
  Target: LAMA2; (+) strand; PAM type: YTN; PAM sequence: TTT
ccccctattttctctttgaa

SEQ ID NO: 409991 - DNA, 20 bp, Artificial Sequence
  Description of Artificial Sequence: Synthetic oligonucleotide
  Target: LAMA2; (+) strand; PAM type: YTN; PAM sequence: TTC
cccctattttctctttgaaa

SEQ ID NO: 409992 - DNA, 20 bp, Artificial Sequence
  Description of Artificial Sequence: Synthetic oligonucleotide
  Target: LAMA2; (+) strand; PAM type: YTN; PAM sequence: CTA
ttttctctttgaaactaaat

SEQ ID NO: 409993 - DNA, 20 bp, Artificial Sequence
  Description of Artificial Sequence: Synthetic oligonucleotide
  Target: LAMA2; (+) strand; PAM type: YTN; PAM sequence: TTT
tctctttgaaactaaatttt

SEQ ID NO: 409994 - DNA, 20 bp, Artificial Sequence
  Description of Artificial Sequence: Synthetic oligonucleotide
  Target: LAMA2; (+) strand; PAM type: YTN; PAM sequence: TTT
ctctttgaaactaaatttta

SEQ ID NO: 409995 - DNA, 20 bp, Artificial Sequence
  Description of Artificial Sequence: Synthetic oligonucleotide
  Target: LAMA2; (+) strand; PAM type: YTN; PAM sequence: TTC
tctttgaaactaaattttac

SEQ ID NO: 409996 - DNA, 20 bp, Artificial Sequence
  Description of Artificial Sequence: Synthetic oligonucleotide
  Target: LAMA2; (+) strand; PAM type: YTN; PAM sequence: CTC
tttgaaactaaattttaccg

SEQ ID NO: 409997 - DNA, 20 bp, Artificial Sequence
  Description of Artificial Sequence: Synthetic oligonucleotide
  Target: LAMA2; (+) strand; PAM type: YTN; PAM sequence: CTT
tgaaactaaattttaccggt

SEQ ID NO: 409998 - DNA, 20 bp, Artificial Sequence
  Description of Artificial Sequence: Synthetic oligonucleotide
  Target: LAMA2; (+) strand; PAM type: YTN; PAM sequence: TTT
gaaactaaattttaccggtc

SEQ ID NO: 409999 - DNA, 20 bp, Artificial Sequence
  Description of Artificial Sequence: Synthetic oligonucleotide
  Target: LAMA2; (+) strand; PAM type: YTN; PAM sequence: TTG
aaactaaattttaccggtcc

SEQ ID NO: 410000 - DNA, 20 bp, Artificial Sequence
  Description of Artificial Sequence: Synthetic oligonucleotide
  Target: LAMA2; (+) strand; PAM type: YTN; PAM sequence: CTA
aattttaccggtcccttctt

SEQ ID NO: 410001 - DNA, 20 bp, Artificial Sequence
  Description of Artificial Sequence: Synthetic oligonucleotide
  Target: LAMA2; (+) strand; PAM type: YTN; PAM sequence: TTT
taccggtcccttcttcaccc

SEQ ID NO: 410002 - DNA, 20 bp, Artificial Sequence
  Description of Artificial Sequence: Synthetic oligonucleotide
  Target: LAMA2; (+) strand; PAM type: YTN; PAM sequence: TTT
accggtcccttcttcacccc

SEQ ID NO: 410003 - DNA, 20 bp, Artificial Sequence
  Description of Artificial Sequence: Synthetic oligonucleotide
  Target: LAMA2; (+) strand; PAM type: YTN; PAM sequence: TTA
ccggtcccttcttcaccccc

SEQ ID NO: 410004 - DNA, 20 bp, Artificial Sequence
  Description of Artificial Sequence: Synthetic oligonucleotide
  Target: LAMA2; (+) strand; PAM type: YTN; PAM sequence: CTT
cttcacccccttaacagtga

SEQ ID NO: 410005 - DNA, 20 bp, Artificial Sequence
  Description of Artificial Sequence: Synthetic oligonucleotide
  Target: LAMA2; (+) strand; PAM type: YTN; PAM sequence: TTC
ttcacccccttaacagtgac

SEQ ID NO: 410006 - DNA, 20 bp, Artificial Sequence
  Description of Artificial Sequence: Synthetic oligonucleotide
  Target: LAMA2; (+) strand; PAM type: YTN; PAM sequence: CTT
cacccccttaacagtgacgt

SEQ ID NO: 410007 - DNA, 20 bp, Artificial Sequence
  Description of Artificial Sequence: Synthetic oligonucleotide
  Target: LAMA2; (+) strand; PAM type: YTN; PAM sequence: TTC
acccccttaacagtgacgtt

SEQ ID NO: 410008 - DNA, 20 bp, Artificial Sequence
  Description of Artificial Sequence: Synthetic oligonucleotide
  Target: LAMA2; (+) strand; PAM type: YTN; PAM sequence: CTT
aacagtgacgtttttgagcc

SEQ ID NO: 410009 - DNA, 20 bp, Artificial Sequence
  Description of Artificial Sequence: Synthetic oligonucleotide
  Target: LAMA2; (+) strand; PAM type: YTN; PAM sequence: TTA
acagtgacgtttttgagcca

SEQ ID NO: 410010 - DNA, 20 bp, Artificial Sequence
  Description of Artificial Sequence: Synthetic oligonucleotide
  Target: LAMA2; (+) strand; PAM type: YTN; PAM sequence: TTT
ttgagccacagcgaaatcca

SEQ ID NO: 410011 - DNA, 20 bp, Artificial Sequence
  Description of Artificial Sequence: Synthetic oligonucleotide
  Target: LAMA2; (+) strand; PAM type: YTN; PAM sequence: TTT
tgagccacagcgaaatccat

SEQ ID NO: 410012 - DNA, 20 bp, Artificial Sequence
  Description of Artificial Sequence: Synthetic oligonucleotide
  Target: LAMA2; (+) strand; PAM type: YTN; PAM sequence: TTT
gagccacagcgaaatccatt

SEQ ID NO: 410013 - DNA, 20 bp, Artificial Sequence
  Description of Artificial Sequence: Synthetic oligonucleotide
  Target: LAMA2; (+) strand; PAM type: YTN; PAM sequence: TTG
agccacagcgaaatccattt

SEQ ID NO: 410014 - DNA, 20 bp, Artificial Sequence
  Description of Artificial Sequence: Synthetic oligonucleotide
  Target: LAMA2; (+) strand; PAM type: YTN; PAM sequence: TTT
tttgtccctttctcttactt

SEQ ID NO: 410015 - DNA, 20 bp, Artificial Sequence
  Description of Artificial Sequence: Synthetic oligonucleotide
  Target: LAMA2; (+) strand; PAM type: YTN; PAM sequence: TTT
ttgtccctttctcttacttt

SEQ ID NO: 410016 - DNA, 20 bp, Artificial Sequence
  Description of Artificial Sequence: Synthetic oligonucleotide
  Target: LAMA2; (+) strand; PAM type: YTN; PAM sequence: TTT
tgtccctttctcttactttt

SEQ ID NO: 410017 - DNA, 20 bp, Artificial Sequence
  Description of Artificial Sequence: Synthetic oligonucleotide
  Target: LAMA2; (+) strand; PAM type: YTN; PAM sequence: TTT
gtccctttctcttacttttg

SEQ ID NO: 410018 - DNA, 20 bp, Artificial Sequence
  Description of Artificial Sequence: Synthetic oligonucleotide
  Target: LAMA2; (+) strand; PAM type: YTN; PAM sequence: TTG
tccctttctcttacttttga

SEQ ID NO: 410019 - DNA, 20 bp, Artificial Sequence
  Description of Artificial Sequence: Synthetic oligonucleotide
  Target: LAMA2; (+) strand; PAM type: YTN; PAM sequence: CTT
tctcttacttttgaattatc

SEQ ID NO: 410020 - DNA, 20 bp, Artificial Sequence
  Description of Artificial Sequence: Synthetic oligonucleotide
  Target: LAMA2; (+) strand; PAM type: YTN; PAM sequence: TTT
ctcttacttttgaattatct

SEQ ID NO: 410021 - DNA, 20 bp, Artificial Sequence
  Description of Artificial Sequence: Synthetic oligonucleotide
  Target: LAMA2; (+) strand; PAM type: YTN; PAM sequence: TTC
tcttacttttgaattatctt

SEQ ID NO: 410022 - DNA, 20 bp, Artificial Sequence
  Description of Artificial Sequence: Synthetic oligonucleotide
  Target: LAMA2; (+) strand; PAM type: YTN; PAM sequence: CTC
ttacttttgaattatcttac

SEQ ID NO: 410023 - DNA, 20 bp, Artificial Sequence
  Description of Artificial Sequence: Synthetic oligonucleotide
  Target: LAMA2; (+) strand; PAM type: YTN; PAM sequence: CTT
acttttgaattatcttactt

SEQ ID NO: 410024 - DNA, 20 bp, Artificial Sequence
  Description of Artificial Sequence: Synthetic oligonucleotide
  Target: LAMA2; (+) strand; PAM type: YTN; PAM sequence: TTA
cttttgaattatcttacttg

SEQ ID NO: 410025 - DNA, 20 bp, Artificial Sequence
  Description of Artificial Sequence: Synthetic oligonucleotide
  Target: LAMA2; (+) strand; PAM type: YTN; PAM sequence: CTT
ttgaattatcttacttgtaa

SEQ ID NO: 410026 - DNA, 20 bp, Artificial Sequence
  Description of Artificial Sequence: Synthetic oligonucleotide
  Target: LAMA2; (+) strand; PAM type: YTN; PAM sequence: TTT
tgaattatcttacttgtaaa

SEQ ID NO: 410027 - DNA, 20 bp, Artificial Sequence
  Description of Artificial Sequence: Synthetic oligonucleotide
  Target: LAMA2; (+) strand; PAM type: YTN; PAM sequence: TTT
gaattatcttacttgtaaag

SEQ ID NO: 410028 - DNA, 20 bp, Artificial Sequence
  Description of Artificial Sequence: Synthetic oligonucleotide
  Target: LAMA2; (+) strand; PAM type: YTN; PAM sequence: TTG
aattatcttacttgtaaagt

SEQ ID NO: 410029 - DNA, 20 bp, Artificial Sequence
  Description of Artificial Sequence: Synthetic oligonucleotide
  Target: LAMA2; (+) strand; PAM type: YTN; PAM sequence: TTA
tcttacttgtaaagtgccaa

SEQ ID NO: 410030 - DNA, 20 bp, Artificial Sequence
  Description of Artificial Sequence: Synthetic oligonucleotide
  Target: LAMA2; (+) strand; PAM type: YTN; PAM sequence: CTT
acttgtaaagtgccaattca

SEQ ID NO: 410031 - DNA, 20 bp, Artificial Sequence
  Description of Artificial Sequence: Synthetic oligonucleotide
  Target: LAMA2; (+) strand; PAM type: YTN; PAM sequence: TTA
cttgtaaagtgccaattcag

SEQ ID NO: 410032 - DNA, 20 bp, Artificial Sequence
  Description of Artificial Sequence: Synthetic oligonucleotide
  Target: LAMA2; (+) strand; PAM type: YTN; PAM sequence: CTT
gtaaagtgccaattcagagc

SEQ ID NO: 410033 - DNA, 20 bp, Artificial Sequence
  Description of Artificial Sequence: Synthetic oligonucleotide
  Target: LAMA2; (+) strand; PAM type: YTN; PAM sequence: TTG
taaagtgccaattcagagca

SEQ ID NO: 410034 - DNA, 20 bp, Artificial Sequence
  Description of Artificial Sequence: Synthetic oligonucleotide
  Target: LAMA2; (+) strand; PAM type: YTN; PAM sequence: TTC
agagcatctttaccctggct

SEQ ID NO: 410035 - DNA, 20 bp, Artificial Sequence
  Description of Artificial Sequence: Synthetic oligonucleotide
  Target: LAMA2; (+) strand; PAM type: YTN; PAM sequence: CTT
taccctggcttattgttttt

SEQ ID NO: 410036 - DNA, 20 bp, Artificial Sequence
  Description of Artificial Sequence: Synthetic oligonucleotide
  Target: LAMA2; (+) strand; PAM type: YTN; PAM sequence: TTT
accctggcttattgtttttt

SEQ ID NO: 410037 - DNA, 20 bp, Artificial Sequence
  Description of Artificial Sequence: Synthetic oligonucleotide
  Target: LAMA2; (+) strand; PAM type: YTN; PAM sequence: TTA
ccctggcttattgttttttc

SEQ ID NO: 410038 - DNA, 20 bp, Artificial Sequence
  Description of Artificial Sequence: Synthetic oligonucleotide
  Target: LAMA2; (+) strand; PAM type: YTN; PAM sequence: CTG
gcttattgttttttccagtt

SEQ ID NO: 410039 - DNA, 20 bp, Artificial Sequence
  Description of Artificial Sequence: Synthetic oligonucleotide
  Target: LAMA2; (+) strand; PAM type: YTN; PAM sequence: CTT
attgttttttccagttctac

SEQ ID NO: 410040 - DNA, 20 bp, Artificial Sequence
  Description of Artificial Sequence: Synthetic oligonucleotide
  Target: LAMA2; (+) strand; PAM type: YTN; PAM sequence: TTA
ttgttttttccagttctaca

SEQ ID NO: 410041 - DNA, 20 bp, Artificial Sequence
  Description of Artificial Sequence: Synthetic oligonucleotide
  Target: LAMA2; (+) strand; PAM type: YTN; PAM sequence: TTG
ttttttccagttctacatgt

SEQ ID NO: 410042 - DNA, 20 bp, Artificial Sequence
  Description of Artificial Sequence: Synthetic oligonucleotide
  Target: LAMA2; (+) strand; PAM type: YTN; PAM sequence: TTT
tttccagttctacatgtggt

SEQ ID NO: 410043 - DNA, 20 bp, Artificial Sequence
  Description of Artificial Sequence: Synthetic oligonucleotide
  Target: LAMA2; (+) strand; PAM type: YTN; PAM sequence: TTT
ttccagttctacatgtggtt

SEQ ID NO: 410044 - DNA, 20 bp, Artificial Sequence
  Description of Artificial Sequence: Synthetic oligonucleotide
  Target: LAMA2; (+) strand; PAM type: YTN; PAM sequence: TTT
tccagttctacatgtggttt

SEQ ID NO: 410045 - DNA, 20 bp, Artificial Sequence
  Description of Artificial Sequence: Synthetic oligonucleotide
  Target: LAMA2; (+) strand; PAM type: YTN; PAM sequence: TTT
ccagttctacatgtggtttt

SEQ ID NO: 410046 - DNA, 20 bp, Artificial Sequence
  Description of Artificial Sequence: Synthetic oligonucleotide
  Target: LAMA2; (+) strand; PAM type: YTN; PAM sequence: TTC
cagttctacatgtggtttta

SEQ ID NO: 410047 - DNA, 20 bp, Artificial Sequence
  Description of Artificial Sequence: Synthetic oligonucleotide
  Target: LAMA2; (+) strand; PAM type: YTN; PAM sequence: TTC
tacatgtggttttacttctt

SEQ ID NO: 410048 - DNA, 20 bp, Artificial Sequence
  Description of Artificial Sequence: Synthetic oligonucleotide
  Target: LAMA2; (+) strand; PAM type: YTN; PAM sequence: CTA
catgtggttttacttcttta

SEQ ID NO: 410049 - DNA, 20 bp, Artificial Sequence
  Description of Artificial Sequence: Synthetic oligonucleotide
  Target: LAMA2; (+) strand; PAM type: YTN; PAM sequence: TTT
tacttctttataaagtcaag

SEQ ID NO: 410050 - DNA, 20 bp, Artificial Sequence
  Description of Artificial Sequence: Synthetic oligonucleotide
  Target: LAMA2; (+) strand; PAM type: YTN; PAM sequence: TTT
acttctttataaagtcaagt

SEQ ID NO: 410051 - DNA, 20 bp, Artificial Sequence
  Description of Artificial Sequence: Synthetic oligonucleotide
  Target: LAMA2; (+) strand; PAM type: YTN; PAM sequence: TTA
cttctttataaagtcaagta

SEQ ID NO: 410052 - DNA, 20 bp, Artificial Sequence
  Description of Artificial Sequence: Synthetic oligonucleotide
  Target: LAMA2; (+) strand; PAM type: YTN; PAM sequence: CTT
ctttataaagtcaagtaaga

SEQ ID NO: 410053 - DNA, 20 bp, Artificial Sequence
  Description of Artificial Sequence: Synthetic oligonucleotide
  Target: LAMA2; (+) strand; PAM type: YTN; PAM sequence: TTC
tttataaagtcaagtaagag

SEQ ID NO: 410054 - DNA, 20 bp, Artificial Sequence
  Description of Artificial Sequence: Synthetic oligonucleotide
  Target: LAMA2; (+) strand; PAM type: YTN; PAM sequence: CTT
tataaagtcaagtaagaggg

SEQ ID NO: 410055 - DNA, 20 bp, Artificial Sequence
  Description of Artificial Sequence: Synthetic oligonucleotide
  Target: LAMA2; (+) strand; PAM type: YTN; PAM sequence: TTT
ataaagtcaagtaagagggt

SEQ ID NO: 410056 - DNA, 20 bp, Artificial Sequence
  Description of Artificial Sequence: Synthetic oligonucleotide
  Target: LAMA2; (+) strand; PAM type: YTN; PAM sequence: TTA
taaagtcaagtaagagggta

SEQ ID NO: 410057 - DNA, 20 bp, Artificial Sequence
  Description of Artificial Sequence: Synthetic oligonucleotide
  Target: LAMA2; (+) strand; PAM type: YTN; PAM sequence: CTT
taggactgaggtttccatcc

SEQ ID NO: 410058 - DNA, 20 bp, Artificial Sequence
  Description of Artificial Sequence: Synthetic oligonucleotide
  Target: LAMA2; (+) strand; PAM type: YTN; PAM sequence: TTT
aggactgaggtttccatcca

SEQ ID NO: 410059 - DNA, 20 bp, Artificial Sequence
  Description of Artificial Sequence: Synthetic oligonucleotide
  Target: LAMA2; (+) strand; PAM type: YTN; PAM sequence: TTA
ggactgaggtttccatccaa

SEQ ID NO: 410060 - DNA, 20 bp, Artificial Sequence
  Description of Artificial Sequence: Synthetic oligonucleotide
  Target: LAMA2; (+) strand; PAM type: YTN; PAM sequence: CTG
aggtttccatccaagtactc

SEQ ID NO: 410061 - DNA, 20 bp, Artificial Sequence
  Description of Artificial Sequence: Synthetic oligonucleotide
  Target: LAMA2; (+) strand; PAM type: YTN; PAM sequence: TTT
ccatccaagtactccggttt

SEQ ID NO: 410062 - DNA, 20 bp, Artificial Sequence
  Description of Artificial Sequence: Synthetic oligonucleotide
  Target: LAMA2; (+) strand; PAM type: YTN; PAM sequence: TTC
catccaagtactccggtttt

SEQ ID NO: 410063 - DNA, 20 bp, Artificial Sequence
  Description of Artificial Sequence: Synthetic oligonucleotide
  Target: LAMA2; (+) strand; PAM type: YTN; PAM sequence: CTC
cggttttctctccagatatg

SEQ ID NO: 410064 - DNA, 20 bp, Artificial Sequence
  Description of Artificial Sequence: Synthetic oligonucleotide
  Target: LAMA2; (+) strand; PAM type: YTN; PAM sequence: TTT
tctctccagatatgaagtaa

SEQ ID NO: 410065 - DNA, 20 bp, Artificial Sequence
  Description of Artificial Sequence: Synthetic oligonucleotide
  Target: LAMA2; (+) strand; PAM type: YTN; PAM sequence: TTT
ctctccagatatgaagtaag

SEQ ID NO: 410066 - DNA, 20 bp, Artificial Sequence
  Description of Artificial Sequence: Synthetic oligonucleotide
  Target: LAMA2; (+) strand; PAM type: YTN; PAM sequence: TTC
tctccagatatgaagtaagt

SEQ ID NO: 410067 - DNA, 20 bp, Artificial Sequence
  Description of Artificial Sequence: Synthetic oligonucleotide
  Target: LAMA2; (+) strand; PAM type: YTN; PAM sequence: CTC
tccagatatgaagtaagttt

SEQ ID NO: 410068 - DNA, 20 bp, Artificial Sequence
  Description of Artificial Sequence: Synthetic oligonucleotide
  Target: LAMA2; (+) strand; PAM type: YTN; PAM sequence: CTC
cagatatgaagtaagttttc

SEQ ID NO: 410069 - DNA, 20 bp, Artificial Sequence
  Description of Artificial Sequence: Synthetic oligonucleotide
  Target: LAMA2; (+) strand; PAM type: YTN; PAM sequence: TTT
tcagtaatccattcatgatc

SEQ ID NO: 410070 - DNA, 20 bp, Artificial Sequence
  Description of Artificial Sequence: Synthetic oligonucleotide
  Target: LAMA2; (+) strand; PAM type: YTN; PAM sequence: TTT
cagtaatccattcatgatcc

SEQ ID NO: 410071 - DNA, 20 bp, Artificial Sequence
  Description of Artificial Sequence: Synthetic oligonucleotide
  Target: LAMA2; (+) strand; PAM type: YTN; PAM sequence: TTC
agtaatccattcatgatccc

SEQ ID NO: 410072 - DNA, 20 bp, Artificial Sequence
  Description of Artificial Sequence: Synthetic oligonucleotide
  Target: LAMA2; (+) strand; PAM type: YTN; PAM sequence: TTC
atgatccccaggctagtgac

SEQ ID NO: 410073 - DNA, 20 bp, Artificial Sequence
  Description of Artificial Sequence: Synthetic oligonucleotide
  Target: LAMA2; (+) strand; PAM type: YTN; PAM sequence: CTA
gtgactaatgcttatgacta

SEQ ID NO: 410074 - DNA, 20 bp, Artificial Sequence
  Description of Artificial Sequence: Synthetic oligonucleotide
  Target: LAMA2; (+) strand; PAM type: YTN; PAM sequence: CTA
atgcttatgactaatagcac

SEQ ID NO: 410075 - DNA, 20 bp, Artificial Sequence
  Description of Artificial Sequence: Synthetic oligonucleotide
  Target: LAMA2; (+) strand; PAM type: YTN; PAM sequence: CTT
atgactaatagcaccatgat

SEQ ID NO: 410076 - DNA, 20 bp, Artificial Sequence
  Description of Artificial Sequence: Synthetic oligonucleotide
  Target: LAMA2; (+) strand; PAM type: YTN; PAM sequence: TTA
tgactaatagcaccatgatg

SEQ ID NO: 410077 - DNA, 20 bp, Artificial Sequence
  Description of Artificial Sequence: Synthetic oligonucleotide
  Target: LAMA2; (+) strand; PAM type: YTN; PAM sequence: CTA
atagcaccatgatgactgtt

SEQ ID NO: 410078 - DNA, 20 bp, Artificial Sequence
  Description of Artificial Sequence: Synthetic oligonucleotide
  Target: LAMA2; (+) strand; PAM type: YTN; PAM sequence: CTG
ttaagaccgaaactcaaaac

SEQ ID NO: 410079 - DNA, 20 bp, Artificial Sequence
  Description of Artificial Sequence: Synthetic oligonucleotide
  Target: LAMA2; (+) strand; PAM type: YTN; PAM sequence: TTA
agaccgaaactcaaaacttg

SEQ ID NO: 410080 - DNA, 20 bp, Artificial Sequence
  Description of Artificial Sequence: Synthetic oligonucleotide
  Target: LAMA2; (+) strand; PAM type: YTN; PAM sequence: CTC
aaaacttgcttccggaacaa

SEQ ID NO: 410081 - DNA, 20 bp, Artificial Sequence
  Description of Artificial Sequence: Synthetic oligonucleotide
  Target: LAMA2; (+) strand; PAM type: YTN; PAM sequence: CTT
gcttccggaacaaaagagaa

SEQ ID NO: 410082 - DNA, 20 bp, Artificial Sequence
  Description of Artificial Sequence: Synthetic oligonucleotide
  Target: LAMA2; (+) strand; PAM type: YTN; PAM sequence: TTG
cttccggaacaaaagagaaa

SEQ ID NO: 410083 - DNA, 20 bp, Artificial Sequence
  Description of Artificial Sequence: Synthetic oligonucleotide
  Target: LAMA2; (+) strand; PAM type: YTN; PAM sequence: CTT
ccggaacaaaagagaaaatg

SEQ ID NO: 410084 - DNA, 20 bp, Artificial Sequence
  Description of Artificial Sequence: Synthetic oligonucleotide
  Target: LAMA2; (+) strand; PAM type: YTN; PAM sequence: TTC
cggaacaaaagagaaaatgc

SEQ ID NO: 410085 - DNA, 20 bp, Artificial Sequence
  Description of Artificial Sequence: Synthetic oligonucleotide
  Target: LAMA2; (+) strand; PAM type: YTN; PAM sequence: CTT
tggtcattttcatcagaact

SEQ ID NO: 410086 - DNA, 20 bp, Artificial Sequence
  Description of Artificial Sequence: Synthetic oligonucleotide
  Target: LAMA2; (+) strand; PAM type: YTN; PAM sequence: TTT
ggtcattttcatcagaactc

SEQ ID NO: 410087 - DNA, 20 bp, Artificial Sequence
  Description of Artificial Sequence: Synthetic oligonucleotide
  Target: LAMA2; (+) strand; PAM type: YTN; PAM sequence: TTG
gtcattttcatcagaactct

SEQ ID NO: 410088 - DNA, 20 bp, Artificial Sequence
  Description of Artificial Sequence: Synthetic oligonucleotide
  Target: LAMA2; (+) strand; PAM type: YTN; PAM sequence: TTT
tcatcagaactctttgtctc

SEQ ID NO: 410089 - DNA, 20 bp, Artificial Sequence
  Description of Artificial Sequence: Synthetic oligonucleotide
  Target: LAMA2; (+) strand; PAM type: YTN; PAM sequence: TTT
catcagaactctttgtctcc

SEQ ID NO: 410090 - DNA, 20 bp, Artificial Sequence
  Description of Artificial Sequence: Synthetic oligonucleotide
  Target: LAMA2; (+) strand; PAM type: YTN; PAM sequence: TTC
atcagaactctttgtctcct

SEQ ID NO: 410091 - DNA, 20 bp, Artificial Sequence
  Description of Artificial Sequence: Synthetic oligonucleotide
  Target: LAMA2; (+) strand; PAM type: YTN; PAM sequence: CTC
tttgtctccttctgattctt

SEQ ID NO: 410092 - DNA, 20 bp, Artificial Sequence
  Description of Artificial Sequence: Synthetic oligonucleotide
  Target: LAMA2; (+) strand; PAM type: YTN; PAM sequence: CTT
tgtctccttctgattcttgg

SEQ ID NO: 410093 - DNA, 20 bp, Artificial Sequence
  Description of Artificial Sequence: Synthetic oligonucleotide
  Target: LAMA2; (+) strand; PAM type: YTN; PAM sequence: TTT
gtctccttctgattcttggc

SEQ ID NO: 410094 - DNA, 20 bp, Artificial Sequence
  Description of Artificial Sequence: Synthetic oligonucleotide
  Target: LAMA2; (+) strand; PAM type: YTN; PAM sequence: TTG
tctccttctgattcttggcc

SEQ ID NO: 410095 - DNA, 20 bp, Artificial Sequence
  Description of Artificial Sequence: Synthetic oligonucleotide
  Target: LAMA2; (+) strand; PAM type: YTN; PAM sequence: CTC
cttctgattcttggcccagg

SEQ ID NO: 410096 - DNA, 20 bp, Artificial Sequence
  Description of Artificial Sequence: Synthetic oligonucleotide
  Target: LAMA2; (+) strand; PAM type: YTN; PAM sequence: CTT
ctgattcttggcccagggat

SEQ ID NO: 410097 - DNA, 20 bp, Artificial Sequence
  Description of Artificial Sequence: Synthetic oligonucleotide
  Target: LAMA2; (+) strand; PAM type: YTN; PAM sequence: TTC
tgattcttggcccagggatc

SEQ ID NO: 410098 - DNA, 20 bp, Artificial Sequence
  Description of Artificial Sequence: Synthetic oligonucleotide
  Target: LAMA2; (+) strand; PAM type: YTN; PAM sequence: CTG
attcttggcccagggatcca

SEQ ID NO: 410099 - DNA, 20 bp, Artificial Sequence
  Description of Artificial Sequence: Synthetic oligonucleotide
  Target: LAMA2; (+) strand; PAM type: YTN; PAM sequence: TTC
ttggcccagggatccaagga

SEQ ID NO: 410100 - DNA, 20 bp, Artificial Sequence
  Description of Artificial Sequence: Synthetic oligonucleotide
  Target: LAMA2; (+) strand; PAM type: YTN; PAM sequence: CTT
ggcccagggatccaaggatt

SEQ ID NO: 410101 - DNA, 20 bp, Artificial Sequence
  Description of Artificial Sequence: Synthetic oligonucleotide
  Target: LAMA2; (+) strand; PAM type: YTN; PAM sequence: TTG
gcccagggatccaaggattg

SEQ ID NO: 410102 - DNA, 20 bp, Artificial Sequence
  Description of Artificial Sequence: Synthetic oligonucleotide
  Target: LAMA2; (+) strand; PAM type: YTN; PAM sequence: TTG
ttgtaaataagtagcatgag

SEQ ID NO: 410103 - DNA, 20 bp, Artificial Sequence
  Description of Artificial Sequence: Synthetic oligonucleotide
  Target: LAMA2; (+) strand; PAM type: YTN; PAM sequence: TTG
taaataagtagcatgaggtt

SEQ ID NO: 410104 - DNA, 20 bp, Artificial Sequence
  Description of Artificial Sequence: Synthetic oligonucleotide
  Target: LAMA2; (+) strand; PAM type: YTN; PAM sequence: TTC
tcaattagcagtgtgtgagt

SEQ ID NO: 410105 - DNA, 20 bp, Artificial Sequence
  Description of Artificial Sequence: Synthetic oligonucleotide
  Target: LAMA2; (+) strand; PAM type: YTN; PAM sequence: CTC
aattagcagtgtgtgagttc

SEQ ID NO: 410106 - DNA, 20 bp, Artificial Sequence
  Description of Artificial Sequence: Synthetic oligonucleotide
  Target: LAMA2; (+) strand; PAM type: YTN; PAM sequence: TTA
gcagtgtgtgagttctctct

SEQ ID NO: 410107 - DNA, 20 bp, Artificial Sequence
  Description of Artificial Sequence: Synthetic oligonucleotide
  Target: LAMA2; (+) strand; PAM type: YTN; PAM sequence: TTC
tctctcataagcaaattagg

SEQ ID NO: 410108 - DNA, 20 bp, Artificial Sequence
  Description of Artificial Sequence: Synthetic oligonucleotide
  Target: LAMA2; (+) strand; PAM type: YTN; PAM sequence: CTC
tctcataagcaaattaggaa

SEQ ID NO: 410109 - DNA, 20 bp, Artificial Sequence
  Description of Artificial Sequence: Synthetic oligonucleotide
  Target: LAMA2; (+) strand; PAM type: YTN; PAM sequence: CTC
tcataagcaaattaggaaaa

SEQ ID NO: 410110 - DNA, 20 bp, Artificial Sequence
  Description of Artificial Sequence: Synthetic oligonucleotide
  Target: LAMA2; (+) strand; PAM type: YTN; PAM sequence: CTC
ataagcaaattaggaaaatt

SEQ ID NO: 410111 - DNA, 20 bp, Artificial Sequence
  Description of Artificial Sequence: Synthetic oligonucleotide
  Target: LAMA2; (+) strand; PAM type: YTN; PAM sequence: TTA
ggaaaattaatgaaacagcc

SEQ ID NO: 410112 - DNA, 20 bp, Artificial Sequence
  Description of Artificial Sequence: Synthetic oligonucleotide
  Target: LAMA2; (+) strand; PAM type: YTN; PAM sequence: TTA
atgaaacagccactaaggaa

SEQ ID NO: 410113 - DNA, 20 bp, Artificial Sequence
  Description of Artificial Sequence: Synthetic oligonucleotide
  Target: LAMA2; (+) strand; PAM type: YTN; PAM sequence: CTA
aggaaaatcattgcaaggaa

SEQ ID NO: 410114 - DNA, 20 bp, Artificial Sequence
  Description of Artificial Sequence: Synthetic oligonucleotide
  Target: LAMA2; (+) strand; PAM type: YTN; PAM sequence: TTG
caaggaacaattagcagggt

SEQ ID NO: 410115 - DNA, 20 bp, Artificial Sequence
  Description of Artificial Sequence: Synthetic oligonucleotide
  Target: LAMA2; (+) strand; PAM type: YTN; PAM sequence: TTA
gcagggtgtccttgcctgcc

SEQ ID NO: 410116 - DNA, 20 bp, Artificial Sequence
  Description of Artificial Sequence: Synthetic oligonucleotide
  Target: LAMA2; (+) strand; PAM type: YTN; PAM sequence: CTT
gcctgcctcttctattcaaa

SEQ ID NO: 410117 - DNA, 20 bp, Artificial Sequence
  Description of Artificial Sequence: Synthetic oligonucleotide
  Target: LAMA2; (+) strand; PAM type: YTN; PAM sequence: TTG
cctgcctcttctattcaaaa

SEQ ID NO: 410118 - DNA, 20 bp, Artificial Sequence
  Description of Artificial Sequence: Synthetic oligonucleotide
  Target: LAMA2; (+) strand; PAM type: YTN; PAM sequence: CTG
cctcttctattcaaaagcca

SEQ ID NO: 410119 - DNA, 20 bp, Artificial Sequence
  Description of Artificial Sequence: Synthetic oligonucleotide
  Target: LAMA2; (+) strand; PAM type: YTN; PAM sequence: CTC
ttctattcaaaagccatcag

SEQ ID NO: 410120 - DNA, 20 bp, Artificial Sequence
  Description of Artificial Sequence: Synthetic oligonucleotide
  Target: LAMA2; (+) strand; PAM type: YTN; PAM sequence: CTT
ctattcaaaagccatcagct

SEQ ID NO: 410121 - DNA, 20 bp, Artificial Sequence
  Description of Artificial Sequence: Synthetic oligonucleotide
  Target: LAMA2; (+) strand; PAM type: YTN; PAM sequence: TTC
tattcaaaagccatcagcta

SEQ ID NO: 410122 - DNA, 20 bp, Artificial Sequence
  Description of Artificial Sequence: Synthetic oligonucleotide
  Target: LAMA2; (+) strand; PAM type: YTN; PAM sequence: CTA
ttcaaaagccatcagctaca

SEQ ID NO: 410123 - DNA, 20 bp, Artificial Sequence
  Description of Artificial Sequence: Synthetic oligonucleotide
  Target: LAMA2; (+) strand; PAM type: YTN; PAM sequence: TTC
aaaagccatcagctacattc

SEQ ID NO: 410124 - DNA, 20 bp, Artificial Sequence
  Description of Artificial Sequence: Synthetic oligonucleotide
  Target: LAMA2; (+) strand; PAM type: YTN; PAM sequence: CTA
cattctttataaaaggtgct

SEQ ID NO: 410125 - DNA, 20 bp, Artificial Sequence
  Description of Artificial Sequence: Synthetic oligonucleotide
  Target: LAMA2; (+) strand; PAM type: YTN; PAM sequence: TTC
tttataaaaggtgctttaag

SEQ ID NO: 410126 - DNA, 20 bp, Artificial Sequence
  Description of Artificial Sequence: Synthetic oligonucleotide
  Target: LAMA2; (+) strand; PAM type: YTN; PAM sequence: CTT
tataaaaggtgctttaagtg

SEQ ID NO: 410127 - DNA, 20 bp, Artificial Sequence
  Description of Artificial Sequence: Synthetic oligonucleotide
  Target: LAMA2; (+) strand; PAM type: YTN; PAM sequence: TTT
ataaaaggtgctttaagtgt

SEQ ID NO: 410128 - DNA, 20 bp, Artificial Sequence
  Description of Artificial Sequence: Synthetic oligonucleotide
  Target: LAMA2; (+) strand; PAM type: YTN; PAM sequence: TTA
taaaaggtgctttaagtgtt

SEQ ID NO: 410129 - DNA, 20 bp, Artificial Sequence
  Description of Artificial Sequence: Synthetic oligonucleotide
  Target: LAMA2; (+) strand; PAM type: YTN; PAM sequence: CTT
taagtgtttgctgttgattc

SEQ ID NO: 410130 - DNA, 20 bp, Artificial Sequence
  Description of Artificial Sequence: Synthetic oligonucleotide
  Target: LAMA2; (+) strand; PAM type: YTN; PAM sequence: TTT
aagtgtttgctgttgattcc

SEQ ID NO: 410131 - DNA, 20 bp, Artificial Sequence
  Description of Artificial Sequence: Synthetic oligonucleotide
  Target: LAMA2; (+) strand; PAM type: YTN; PAM sequence: TTA
agtgtttgctgttgattcct

SEQ ID NO: 410132 - DNA, 20 bp, Artificial Sequence
  Description of Artificial Sequence: Synthetic oligonucleotide
  Target: LAMA2; (+) strand; PAM type: YTN; PAM sequence: TTT
gctgttgattcctgcaatct

SEQ ID NO: 410133 - DNA, 20 bp, Artificial Sequence
  Description of Artificial Sequence: Synthetic oligonucleotide
  Target: LAMA2; (+) strand; PAM type: YTN; PAM sequence: TTG
ctgttgattcctgcaatcta

SEQ ID NO: 410134 - DNA, 20 bp, Artificial Sequence
  Description of Artificial Sequence: Synthetic oligonucleotide
  Target: LAMA2; (+) strand; PAM type: YTN; PAM sequence: CTG
ttgattcctgcaatctaagc

SEQ ID NO: 410135 - DNA, 20 bp, Artificial Sequence
  Description of Artificial Sequence: Synthetic oligonucleotide
  Target: LAMA2; (+) strand; PAM type: YTN; PAM sequence: TTG
attcctgcaatctaagctct

SEQ ID NO: 410136 - DNA, 20 bp, Artificial Sequence
  Description of Artificial Sequence: Synthetic oligonucleotide
  Target: LAMA2; (+) strand; PAM type: YTN; PAM sequence: TTC
ctgcaatctaagctctcagg

SEQ ID NO: 410137 - DNA, 20 bp, Artificial Sequence
  Description of Artificial Sequence: Synthetic oligonucleotide
  Target: LAMA2; (+) strand; PAM type: YTN; PAM sequence: CTG
caatctaagctctcaggagc

SEQ ID NO: 410138 - DNA, 20 bp, Artificial Sequence
  Description of Artificial Sequence: Synthetic oligonucleotide
  Target: LAMA2; (+) strand; PAM type: YTN; PAM sequence: CTA
agctctcaggagcatggttt

SEQ ID NO: 410139 - DNA, 20 bp, Artificial Sequence
  Description of Artificial Sequence: Synthetic oligonucleotide
  Target: LAMA2; (+) strand; PAM type: YTN; PAM sequence: CTC
tcaggagcatggtttgttcc

SEQ ID NO: 410140 - DNA, 20 bp, Artificial Sequence
  Description of Artificial Sequence: Synthetic oligonucleotide
  Target: LAMA2; (+) strand; PAM type: YTN; PAM sequence: CTC
aggagcatggtttgttccct

SEQ ID NO: 410141 - DNA, 20 bp, Artificial Sequence
  Description of Artificial Sequence: Synthetic oligonucleotide
  Target: LAMA2; (+) strand; PAM type: YTN; PAM sequence: TTT
gttccctagcaagaagataa

SEQ ID NO: 410142 - DNA, 20 bp, Artificial Sequence
  Description of Artificial Sequence: Synthetic oligonucleotide
  Target: LAMA2; (+) strand; PAM type: YTN; PAM sequence: TTG
ttccctagcaagaagataat

SEQ ID NO: 410143 - DNA, 20 bp, Artificial Sequence
  Description of Artificial Sequence: Synthetic oligonucleotide
  Target: LAMA2; (+) strand; PAM type: YTN; PAM sequence: TTC
cctagcaagaagataatagc

SEQ ID NO: 410144 - DNA, 20 bp, Artificial Sequence
  Description of Artificial Sequence: Synthetic oligonucleotide
  Target: LAMA2; (+) strand; PAM type: YTN; PAM sequence: CTA
gcaagaagataatagccagc

SEQ ID NO: 410145 - DNA, 20 bp, Artificial Sequence
  Description of Artificial Sequence: Synthetic oligonucleotide
  Target: LAMA2; (+) strand; PAM type: YTN; PAM sequence: CTT
tgctaaacctgccaaccctt

SEQ ID NO: 410146 - DNA, 20 bp, Artificial Sequence
  Description of Artificial Sequence: Synthetic oligonucleotide
  Target: LAMA2; (+) strand; PAM type: YTN; PAM sequence: TTT
gctaaacctgccaaccctta

SEQ ID NO: 410147 - DNA, 20 bp, Artificial Sequence
  Description of Artificial Sequence: Synthetic oligonucleotide
  Target: LAMA2; (+) strand; PAM type: YTN; PAM sequence: TTG
ctaaacctgccaacccttat

SEQ ID NO: 410148 - DNA, 20 bp, Artificial Sequence
  Description of Artificial Sequence: Synthetic oligonucleotide
  Target: LAMA2; (+) strand; PAM type: YTN; PAM sequence: CTA
aacctgccaacccttatacg

SEQ ID NO: 410149 - DNA, 20 bp, Artificial Sequence
  Description of Artificial Sequence: Synthetic oligonucleotide
  Target: LAMA2; (+) strand; PAM type: YTN; PAM sequence: CTG
ccaacccttatacggttaga

SEQ ID NO: 410150 - DNA, 20 bp, Artificial Sequence
  Description of Artificial Sequence: Synthetic oligonucleotide
  Target: LAMA2; (+) strand; PAM type: YTN; PAM sequence: CTT
atacggttagacattactgc

SEQ ID NO: 410151 - DNA, 20 bp, Artificial Sequence
  Description of Artificial Sequence: Synthetic oligonucleotide
  Target: LAMA2; (+) strand; PAM type: YTN; PAM sequence: TTA
tacggttagacattactgca

SEQ ID NO: 410152 - DNA, 20 bp, Artificial Sequence
  Description of Artificial Sequence: Synthetic oligonucleotide
  Target: LAMA2; (+) strand; PAM type: YTN; PAM sequence: TTA
gacattactgcacactgcag

SEQ ID NO: 410153 - DNA, 20 bp, Artificial Sequence
  Description of Artificial Sequence: Synthetic oligonucleotide
  Target: LAMA2; (+) strand; PAM type: YTN; PAM sequence: TTA
ctgcacactgcagaagcctc

SEQ ID NO: 410154 - DNA, 20 bp, Artificial Sequence
  Description of Artificial Sequence: Synthetic oligonucleotide
  Target: LAMA2; (+) strand; PAM type: YTN; PAM sequence: CTG
cacactgcagaagcctcagt

SEQ ID NO: 410155 - DNA, 20 bp, Artificial Sequence
  Description of Artificial Sequence: Synthetic oligonucleotide
  Target: LAMA2; (+) strand; PAM type: YTN; PAM sequence: CTG
cagaagcctcagttctcaca

SEQ ID NO: 410156 - DNA, 20 bp, Artificial Sequence
  Description of Artificial Sequence: Synthetic oligonucleotide
  Target: LAMA2; (+) strand; PAM type: YTN; PAM sequence: CTC
agttctcacaggctcatgtg

SEQ ID NO: 410157 - DNA, 20 bp, Artificial Sequence
  Description of Artificial Sequence: Synthetic oligonucleotide
  Target: LAMA2; (+) strand; PAM type: YTN; PAM sequence: TTC
tcacaggctcatgtgttggg

SEQ ID NO: 410158 - DNA, 20 bp, Artificial Sequence
  Description of Artificial Sequence: Synthetic oligonucleotide
  Target: LAMA2; (+) strand; PAM type: YTN; PAM sequence: CTC
acaggctcatgtgttgggct

SEQ ID NO: 410159 - DNA, 20 bp, Artificial Sequence
  Description of Artificial Sequence: Synthetic oligonucleotide
  Target: LAMA2; (+) strand; PAM type: YTN; PAM sequence: CTC
atgtgttgggctgcacagcg

SEQ ID NO: 410160 - DNA, 20 bp, Artificial Sequence
  Description of Artificial Sequence: Synthetic oligonucleotide
  Target: LAMA2; (+) strand; PAM type: YTN; PAM sequence: TTG
ggctgcacagcgctgttgtc

SEQ ID NO: 410161 - DNA, 20 bp, Artificial Sequence
  Description of Artificial Sequence: Synthetic oligonucleotide
  Target: LAMA2; (+) strand; PAM type: YTN; PAM sequence: CTG
cacagcgctgttgtcagctc

SEQ ID NO: 410162 - DNA, 20 bp, Artificial Sequence
  Description of Artificial Sequence: Synthetic oligonucleotide
  Target: LAMA2; (+) strand; PAM type: YTN; PAM sequence: CTG
ttgtcagctctacaagaggc

SEQ ID NO: 410163 - DNA, 20 bp, Artificial Sequence
  Description of Artificial Sequence: Synthetic oligonucleotide
  Target: LAMA2; (+) strand; PAM type: YTN; PAM sequence: TTG
tcagctctacaagaggctaa

SEQ ID NO: 410164 - DNA, 20 bp, Artificial Sequence
  Description of Artificial Sequence: Synthetic oligonucleotide
  Target: LAMA2; (+) strand; PAM type: YTN; PAM sequence: CTC
tacaagaggctaatgttgca

SEQ ID NO: 410165 - DNA, 20 bp, Artificial Sequence
  Description of Artificial Sequence: Synthetic oligonucleotide
  Target: LAMA2; (+) strand; PAM type: YTN; PAM sequence: CTA
caagaggctaatgttgcagt

SEQ ID NO: 410166 - DNA, 20 bp, Artificial Sequence
  Description of Artificial Sequence: Synthetic oligonucleotide
  Target: LAMA2; (+) strand; PAM type: YTN; PAM sequence: CTA
atgttgcagtgcgccatgac

SEQ ID NO: 410167 - DNA, 20 bp, Artificial Sequence
  Description of Artificial Sequence: Synthetic oligonucleotide
  Target: LAMA2; (+) strand; PAM type: YTN; PAM sequence: TTG
cagtgcgccatgacctggtt

SEQ ID NO: 410168 - DNA, 20 bp, Artificial Sequence
  Description of Artificial Sequence: Synthetic oligonucleotide
  Target: LAMA2; (+) strand; PAM type: YTN; PAM sequence: CTG
gtttcagtaaactttcagga

SEQ ID NO: 410169 - DNA, 20 bp, Artificial Sequence
  Description of Artificial Sequence: Synthetic oligonucleotide
  Target: LAMA2; (+) strand; PAM type: YTN; PAM sequence: TTT
cagtaaactttcaggaagag

SEQ ID NO: 410170 - DNA, 20 bp, Artificial Sequence
  Description of Artificial Sequence: Synthetic oligonucleotide
  Target: LAMA2; (+) strand; PAM type: YTN; PAM sequence: TTC
agtaaactttcaggaagagt

SEQ ID NO: 410171 - DNA, 20 bp, Artificial Sequence
  Description of Artificial Sequence: Synthetic oligonucleotide
  Target: LAMA2; (+) strand; PAM type: YTN; PAM sequence: CTT
tcaggaagagtgaacgaggg

SEQ ID NO: 410172 - DNA, 20 bp, Artificial Sequence
  Description of Artificial Sequence: Synthetic oligonucleotide
  Target: LAMA2; (+) strand; PAM type: YTN; PAM sequence: TTT
caggaagagtgaacgaggga

SEQ ID NO: 410173 - DNA, 20 bp, Artificial Sequence
  Description of Artificial Sequence: Synthetic oligonucleotide
  Target: LAMA2; (+) strand; PAM type: YTN; PAM sequence: TTC
aggaagagtgaacgagggag

SEQ ID NO: 410174 - DNA, 20 bp, Artificial Sequence
  Description of Artificial Sequence: Synthetic oligonucleotide
  Target: LAMA2; (+) strand; PAM type: YTN; PAM sequence: CTG
agaacagcgtttgcttagtg

SEQ ID NO: 410175 - DNA, 20 bp, Artificial Sequence
  Description of Artificial Sequence: Synthetic oligonucleotide
  Target: LAMA2; (+) strand; PAM type: YTN; PAM sequence: TTT
gcttagtgtagaattcctaa

SEQ ID NO: 410176 - DNA, 20 bp, Artificial Sequence
  Description of Artificial Sequence: Synthetic oligonucleotide
  Target: LAMA2; (+) strand; PAM type: YTN; PAM sequence: TTG
cttagtgtagaattcctaag

SEQ ID NO: 410177 - DNA, 20 bp, Artificial Sequence
  Description of Artificial Sequence: Synthetic oligonucleotide
  Target: LAMA2; (+) strand; PAM type: YTN; PAM sequence: CTT
agtgtagaattcctaagcat

SEQ ID NO: 410178 - DNA, 20 bp, Artificial Sequence
  Description of Artificial Sequence: Synthetic oligonucleotide
  Target: LAMA2; (+) strand; PAM type: YTN; PAM sequence: TTA
gtgtagaattcctaagcatc

SEQ ID NO: 410179 - DNA, 20 bp, Artificial Sequence
  Description of Artificial Sequence: Synthetic oligonucleotide
  Target: LAMA2; (+) strand; PAM type: YTN; PAM sequence: TTC
ctaagcatccaattttggct

SEQ ID NO: 410180 - DNA, 20 bp, Artificial Sequence
  Description of Artificial Sequence: Synthetic oligonucleotide
  Target: LAMA2; (+) strand; PAM type: YTN; PAM sequence: CTA
agcatccaattttggctccc

SEQ ID NO: 410181 - DNA, 20 bp, Artificial Sequence
  Description of Artificial Sequence: Synthetic oligonucleotide
  Target: LAMA2; (+) strand; PAM type: YTN; PAM sequence: TTT
tggctcccttaaaagctatg

SEQ ID NO: 410182 - DNA, 20 bp, Artificial Sequence
  Description of Artificial Sequence: Synthetic oligonucleotide
  Target: LAMA2; (+) strand; PAM type: YTN; PAM sequence: TTT
ggctcccttaaaagctatgg

SEQ ID NO: 410183 - DNA, 20 bp, Artificial Sequence
  Description of Artificial Sequence: Synthetic oligonucleotide
  Target: LAMA2; (+) strand; PAM type: YTN; PAM sequence: TTG
gctcccttaaaagctatggt

SEQ ID NO: 410184 - DNA, 20 bp, Artificial Sequence
  Description of Artificial Sequence: Synthetic oligonucleotide
  Target: LAMA2; (+) strand; PAM type: YTN; PAM sequence: CTC
ccttaaaagctatggttgag

SEQ ID NO: 410185 - DNA, 20 bp, Artificial Sequence
  Description of Artificial Sequence: Synthetic oligonucleotide
  Target: LAMA2; (+) strand; PAM type: YTN; PAM sequence: CTT
aaaagctatggttgagaggg

SEQ ID NO: 410186 - DNA, 20 bp, Artificial Sequence
  Description of Artificial Sequence: Synthetic oligonucleotide
  Target: LAMA2; (+) strand; PAM type: YTN; PAM sequence: TTA
aaagctatggttgagagggg

SEQ ID NO: 410187 - DNA, 20 bp, Artificial Sequence
  Description of Artificial Sequence: Synthetic oligonucleotide
  Target: LAMA2; (+) strand; PAM type: YTN; PAM sequence: CTA
tggttgagaggggtgaaggg

SEQ ID NO: 410188 - DNA, 20 bp, Artificial Sequence
  Description of Artificial Sequence: Synthetic oligonucleotide
  Target: LAMA2; (+) strand; PAM type: YTN; PAM sequence: TTG
agaggggtgaagggtggcag

SEQ ID NO: 410189 - DNA, 20 bp, Artificial Sequence
  Description of Artificial Sequence: Synthetic oligonucleotide
  Target: LAMA2; (+) strand; PAM type: YTN; PAM sequence: TTT
gatttccaactgtattgaat

SEQ ID NO: 410190 - DNA, 20 bp, Artificial Sequence
  Description of Artificial Sequence: Synthetic oligonucleotide
  Target: LAMA2; (+) strand; PAM type: YTN; PAM sequence: TTG
atttccaactgtattgaatc

SEQ ID NO: 410191 - DNA, 20 bp, Artificial Sequence
  Description of Artificial Sequence: Synthetic oligonucleotide
  Target: LAMA2; (+) strand; PAM type: YTN; PAM sequence: TTT
ccaactgtattgaatcagat

SEQ ID NO: 410192 - DNA, 20 bp, Artificial Sequence
  Description of Artificial Sequence: Synthetic oligonucleotide
  Target: LAMA2; (+) strand; PAM type: YTN; PAM sequence: TTC
caactgtattgaatcagatg

SEQ ID NO: 410193 - DNA, 20 bp, Artificial Sequence
  Description of Artificial Sequence: Synthetic oligonucleotide
  Target: LAMA2; (+) strand; PAM type: YTN; PAM sequence: CTG
tattgaatcagatgtgactt

SEQ ID NO: 410194 - DNA, 20 bp, Artificial Sequence
  Description of Artificial Sequence: Synthetic oligonucleotide
  Target: LAMA2; (+) strand; PAM type: YTN; PAM sequence: TTG
aatcagatgtgacttatact

SEQ ID NO: 410195 - DNA, 20 bp, Artificial Sequence
  Description of Artificial Sequence: Synthetic oligonucleotide
  Target: LAMA2; (+) strand; PAM type: YTN; PAM sequence: CTT
atacttgtttatttttaata

SEQ ID NO: 410196 - DNA, 20 bp, Artificial Sequence
  Description of Artificial Sequence: Synthetic oligonucleotide
  Target: LAMA2; (+) strand; PAM type: YTN; PAM sequence: TTA
tacttgtttatttttaatat

SEQ ID NO: 410197 - DNA, 20 bp, Artificial Sequence
  Description of Artificial Sequence: Synthetic oligonucleotide
  Target: LAMA2; (+) strand; PAM type: YTN; PAM sequence: CTT
gtttatttttaatattttat

SEQ ID NO: 410198 - DNA, 20 bp, Artificial Sequence
  Description of Artificial Sequence: Synthetic oligonucleotide
  Target: LAMA2; (+) strand; PAM type: YTN; PAM sequence: TTG
tttatttttaatattttatc

SEQ ID NO: 410199 - DNA, 20 bp, Artificial Sequence
  Description of Artificial Sequence: Synthetic oligonucleotide
  Target: LAMA2; (+) strand; PAM type: YTN; PAM sequence: TTT
atttttaatattttatcagc

SEQ ID NO: 410200 - DNA, 20 bp, Artificial Sequence
  Description of Artificial Sequence: Synthetic oligonucleotide
  Target: LAMA2; (+) strand; PAM type: YTN; PAM sequence: TTA
tttttaatattttatcagca

SEQ ID NO: 410201 - DNA, 20 bp, Artificial Sequence
  Description of Artificial Sequence: Synthetic oligonucleotide
  Target: LAMA2; (+) strand; PAM type: YTN; PAM sequence: TTT
ttaatattttatcagcatct

SEQ ID NO: 410202 - DNA, 20 bp, Artificial Sequence
  Description of Artificial Sequence: Synthetic oligonucleotide
  Target: LAMA2; (+) strand; PAM type: YTN; PAM sequence: TTT
taatattttatcagcatctt

SEQ ID NO: 410203 - DNA, 20 bp, Artificial Sequence
  Description of Artificial Sequence: Synthetic oligonucleotide
  Target: LAMA2; (+) strand; PAM type: YTN; PAM sequence: TTT
aatattttatcagcatcttt

SEQ ID NO: 410204 - DNA, 20 bp, Artificial Sequence
  Description of Artificial Sequence: Synthetic oligonucleotide
  Target: LAMA2; (+) strand; PAM type: YTN; PAM sequence: TTA
atattttatcagcatcttta

SEQ ID NO: 410205 - DNA, 20 bp, Artificial Sequence
  Description of Artificial Sequence: Synthetic oligonucleotide
  Target: LAMA2; (+) strand; PAM type: YTN; PAM sequence: TTT
tatcagcatctttacagttc

SEQ ID NO: 410206 - DNA, 20 bp, Artificial Sequence
  Description of Artificial Sequence: Synthetic oligonucleotide
  Target: LAMA2; (+) strand; PAM type: YTN; PAM sequence: TTT
atcagcatctttacagttca

SEQ ID NO: 410207 - DNA, 20 bp, Artificial Sequence
  Description of Artificial Sequence: Synthetic oligonucleotide
  Target: LAMA2; (+) strand; PAM type: YTN; PAM sequence: TTA
tcagcatctttacagttcaa

SEQ ID NO: 410208 - DNA, 20 bp, Artificial Sequence
  Description of Artificial Sequence: Synthetic oligonucleotide
  Target: LAMA2; (+) strand; PAM type: YTN; PAM sequence: CTT
tacagttcaagtggatgaaa

SEQ ID NO: 410209 - DNA, 20 bp, Artificial Sequence
  Description of Artificial Sequence: Synthetic oligonucleotide
  Target: LAMA2; (+) strand; PAM type: YTN; PAM sequence: TTT
acagttcaagtggatgaaaa

SEQ ID NO: 410210 - DNA, 20 bp, Artificial Sequence
  Description of Artificial Sequence: Synthetic oligonucleotide
  Target: LAMA2; (+) strand; PAM type: YTN; PAM sequence: TTA
cagttcaagtggatgaaaac

SEQ ID NO: 410211 - DNA, 20 bp, Artificial Sequence
  Description of Artificial Sequence: Synthetic oligonucleotide
  Target: LAMA2; (+) strand; PAM type: YTN; PAM sequence: TTC
aagtggatgaaaacagaaga

SEQ ID NO: 410212 - DNA, 20 bp, Artificial Sequence
  Description of Artificial Sequence: Synthetic oligonucleotide
  Target: LAMA2; (+) strand; PAM type: YTN; PAM sequence: CTG
acagttgaacagcctatcga

SEQ ID NO: 410213 - DNA, 20 bp, Artificial Sequence
  Description of Artificial Sequence: Synthetic oligonucleotide
  Target: LAMA2; (+) strand; PAM type: YTN; PAM sequence: TTG
aacagcctatcgaagttaaa

SEQ ID NO: 410214 - DNA, 20 bp, Artificial Sequence
  Description of Artificial Sequence: Synthetic oligonucleotide
  Target: LAMA2; (+) strand; PAM type: YTN; PAM sequence: CTA
tcgaagttaaaaagcttttc

SEQ ID NO: 410215 - DNA, 20 bp, Artificial Sequence
  Description of Artificial Sequence: Synthetic oligonucleotide
  Target: LAMA2; (+) strand; PAM type: YTN; PAM sequence: TTA
aaaagcttttcgttgggggt

SEQ ID NO: 410216 - DNA, 20 bp, Artificial Sequence
  Description of Artificial Sequence: Synthetic oligonucleotide
  Target: LAMA2; (+) strand; PAM type: YTN; PAM sequence: CTT
ttcgttgggggtgctccacc

SEQ ID NO: 410217 - DNA, 20 bp, Artificial Sequence
  Description of Artificial Sequence: Synthetic oligonucleotide
  Target: LAMA2; (+) strand; PAM type: YTN; PAM sequence: TTT
tcgttgggggtgctccacct

SEQ ID NO: 410218 - DNA, 20 bp, Artificial Sequence
  Description of Artificial Sequence: Synthetic oligonucleotide
  Target: LAMA2; (+) strand; PAM type: YTN; PAM sequence: TTT
cgttgggggtgctccacctg

SEQ ID NO: 410219 - DNA, 20 bp, Artificial Sequence
  Description of Artificial Sequence: Synthetic oligonucleotide
  Target: LAMA2; (+) strand; PAM type: YTN; PAM sequence: TTC
gttgggggtgctccacctga

SEQ ID NO: 410220 - DNA, 20 bp, Artificial Sequence
  Description of Artificial Sequence: Synthetic oligonucleotide
  Target: LAMA2; (+) strand; PAM type: YTN; PAM sequence: TTG
ggggtgctccacctgaattt

SEQ ID NO: 410221 - DNA, 20 bp, Artificial Sequence
  Description of Artificial Sequence: Synthetic oligonucleotide
  Target: LAMA2; (+) strand; PAM type: YTN; PAM sequence: CTC
cacctgaatttcaaccttcc

SEQ ID NO: 410222 - DNA, 20 bp, Artificial Sequence
  Description of Artificial Sequence: Synthetic oligonucleotide
  Target: LAMA2; (+) strand; PAM type: YTN; PAM sequence: CTG
aatttcaaccttccccactc

SEQ ID NO: 410223 - DNA, 20 bp, Artificial Sequence
  Description of Artificial Sequence: Synthetic oligonucleotide
  Target: LAMA2; (+) strand; PAM type: YTN; PAM sequence: TTT
caaccttccccactcagaaa

SEQ ID NO: 410224 - DNA, 20 bp, Artificial Sequence
  Description of Artificial Sequence: Synthetic oligonucleotide
  Target: LAMA2; (+) strand; PAM type: YTN; PAM sequence: TTC
aaccttccccactcagaaat

SEQ ID NO: 410225 - DNA, 20 bp, Artificial Sequence
  Description of Artificial Sequence: Synthetic oligonucleotide
  Target: LAMA2; (+) strand; PAM type: YTN; PAM sequence: CTT
ccccactcagaaatattcct

SEQ ID NO: 410226 - DNA, 20 bp, Artificial Sequence
  Description of Artificial Sequence: Synthetic oligonucleotide
  Target: LAMA2; (+) strand; PAM type: YTN; PAM sequence: TTC
cccactcagaaatattcctc

SEQ ID NO: 410227 - DNA, 20 bp, Artificial Sequence
  Description of Artificial Sequence: Synthetic oligonucleotide
  Target: LAMA2; (+) strand; PAM type: YTN; PAM sequence: CTC
agaaatattcctccttttga

SEQ ID NO: 410228 - DNA, 20 bp, Artificial Sequence
  Description of Artificial Sequence: Synthetic oligonucleotide
  Target: LAMA2; (+) strand; PAM type: YTN; PAM sequence: TTC
ctccttttgaaggctgcata

SEQ ID NO: 410229 - DNA, 20 bp, Artificial Sequence
  Description of Artificial Sequence: Synthetic oligonucleotide
  Target: LAMA2; (+) strand; PAM type: YTN; PAM sequence: CTC
cttttgaaggctgcatatgg

SEQ ID NO: 410230 - DNA, 20 bp, Artificial Sequence
  Description of Artificial Sequence: Synthetic oligonucleotide
  Target: LAMA2; (+) strand; PAM type: YTN; PAM sequence: CTT
ttgaaggctgcatatggaat

SEQ ID NO: 410231 - DNA, 20 bp, Artificial Sequence
  Description of Artificial Sequence: Synthetic oligonucleotide
  Target: LAMA2; (+) strand; PAM type: YTN; PAM sequence: TTT
tgaaggctgcatatggaatc

SEQ ID NO: 410232 - DNA, 20 bp, Artificial Sequence
  Description of Artificial Sequence: Synthetic oligonucleotide
  Target: LAMA2; (+) strand; PAM type: YTN; PAM sequence: TTT
gaaggctgcatatggaatct

SEQ ID NO: 410233 - DNA, 20 bp, Artificial Sequence
  Description of Artificial Sequence: Synthetic oligonucleotide
  Target: LAMA2; (+) strand; PAM type: YTN; PAM sequence: TTG
aaggctgcatatggaatctt

SEQ ID NO: 410234 - DNA, 20 bp, Artificial Sequence
  Description of Artificial Sequence: Synthetic oligonucleotide
  Target: LAMA2; (+) strand; PAM type: YTN; PAM sequence: CTG
catatggaatcttgttatta

SEQ ID NO: 410235 - DNA, 20 bp, Artificial Sequence
  Description of Artificial Sequence: Synthetic oligonucleotide
  Target: LAMA2; (+) strand; PAM type: YTN; PAM sequence: CTT
gttattaactctgtgtaagt

SEQ ID NO: 410236 - DNA, 20 bp, Artificial Sequence
  Description of Artificial Sequence: Synthetic oligonucleotide
  Target: LAMA2; (+) strand; PAM type: YTN; PAM sequence: TTG
ttattaactctgtgtaagtg

SEQ ID NO: 410237 - DNA, 20 bp, Artificial Sequence
  Description of Artificial Sequence: Synthetic oligonucleotide
  Target: LAMA2; (+) strand; PAM type: YTN; PAM sequence: TTA
ttaactctgtgtaagtggat

SEQ ID NO: 410238 - DNA, 20 bp, Artificial Sequence
  Description of Artificial Sequence: Synthetic oligonucleotide
  Target: LAMA2; (+) strand; PAM type: YTN; PAM sequence: TTA
actctgtgtaagtggatctc

SEQ ID NO: 410239 - DNA, 20 bp, Artificial Sequence
  Description of Artificial Sequence: Synthetic oligonucleotide
  Target: LAMA2; (+) strand; PAM type: YTN; PAM sequence: CTC
tgtgtaagtggatctcctca

SEQ ID NO: 410240 - DNA, 20 bp, Artificial Sequence
  Description of Artificial Sequence: Synthetic oligonucleotide
  Target: LAMA2; (+) strand; PAM type: YTN; PAM sequence: CTG
tgtaagtggatctcctcatt

SEQ ID NO: 410241 - DNA, 20 bp, Artificial Sequence
  Description of Artificial Sequence: Synthetic oligonucleotide
  Target: LAMA2; (+) strand; PAM type: YTN; PAM sequence: CTC
ctcattactactactaattt

SEQ ID NO: 410242 - DNA, 20 bp, Artificial Sequence
  Description of Artificial Sequence: Synthetic oligonucleotide
  Target: LAMA2; (+) strand; PAM type: YTN; PAM sequence: CTC
attactactactaatttttt

SEQ ID NO: 410243 - DNA, 20 bp, Artificial Sequence
  Description of Artificial Sequence: Synthetic oligonucleotide
  Target: LAMA2; (+) strand; PAM type: YTN; PAM sequence: TTA
ctactactaattttttattt

SEQ ID NO: 410244 - DNA, 20 bp, Artificial Sequence
  Description of Artificial Sequence: Synthetic oligonucleotide
  Target: LAMA2; (+) strand; PAM type: YTN; PAM sequence: CTA
ctactaattttttattttta

SEQ ID NO: 410245 - DNA, 20 bp, Artificial Sequence
  Description of Artificial Sequence: Synthetic oligonucleotide
  Target: LAMA2; (+) strand; PAM type: YTN; PAM sequence: CTA
ctaattttttatttttattt

SEQ ID NO: 410246 - DNA, 20 bp, Artificial Sequence
  Description of Artificial Sequence: Synthetic oligonucleotide
  Target: LAMA2; (+) strand; PAM type: YTN; PAM sequence: CTA
attttttatttttatttctt

SEQ ID NO: 410247 - DNA, 20 bp, Artificial Sequence
  Description of Artificial Sequence: Synthetic oligonucleotide
  Target: LAMA2; (+) strand; PAM type: YTN; PAM sequence: TTT
tttatttttatttcttgcta

SEQ ID NO: 410248 - DNA, 20 bp, Artificial Sequence
  Description of Artificial Sequence: Synthetic oligonucleotide
  Target: LAMA2; (+) strand; PAM type: YTN; PAM sequence: TTT
ttatttttatttcttgctat

SEQ ID NO: 410249 - DNA, 20 bp, Artificial Sequence
  Description of Artificial Sequence: Synthetic oligonucleotide
  Target: LAMA2; (+) strand; PAM type: YTN; PAM sequence: TTT
tatttttatttcttgctatt

SEQ ID NO: 410250 - DNA, 20 bp, Artificial Sequence
  Description of Artificial Sequence: Synthetic oligonucleotide
  Target: LAMA2; (+) strand; PAM type: YTN; PAM sequence: TTT
atttttatttcttgctatta

SEQ ID NO: 410251 - DNA, 20 bp, Artificial Sequence
  Description of Artificial Sequence: Synthetic oligonucleotide
  Target: LAMA2; (+) strand; PAM type: YTN; PAM sequence: TTA
tttttatttcttgctattag

SEQ ID NO: 410252 - DNA, 20 bp, Artificial Sequence
  Description of Artificial Sequence: Synthetic oligonucleotide
  Target: LAMA2; (+) strand; PAM type: YTN; PAM sequence: TTT
ttatttcttgctattagggg

SEQ ID NO: 410253 - DNA, 20 bp, Artificial Sequence
  Description of Artificial Sequence: Synthetic oligonucleotide
  Target: LAMA2; (+) strand; PAM type: YTN; PAM sequence: TTT
tatttcttgctattaggggt

SEQ ID NO: 410254 - DNA, 20 bp, Artificial Sequence
  Description of Artificial Sequence: Synthetic oligonucleotide
  Target: LAMA2; (+) strand; PAM type: YTN; PAM sequence: TTT
atttcttgctattaggggtc

SEQ ID NO: 410255 - DNA, 20 bp, Artificial Sequence
  Description of Artificial Sequence: Synthetic oligonucleotide
  Target: LAMA2; (+) strand; PAM type: YTN; PAM sequence: TTA
tttcttgctattaggggtcc

SEQ ID NO: 410256 - DNA, 20 bp, Artificial Sequence
  Description of Artificial Sequence: Synthetic oligonucleotide
  Target: LAMA2; (+) strand; PAM type: YTN; PAM sequence: TTT
cttgctattaggggtcccaa

SEQ ID NO: 410257 - DNA, 20 bp, Artificial Sequence
  Description of Artificial Sequence: Synthetic oligonucleotide
  Target: LAMA2; (+) strand; PAM type: YTN; PAM sequence: TTC
ttgctattaggggtcccaat

SEQ ID NO: 410258 - DNA, 20 bp, Artificial Sequence
  Description of Artificial Sequence: Synthetic oligonucleotide
  Target: LAMA2; (+) strand; PAM type: YTN; PAM sequence: CTT
gctattaggggtcccaatgc

SEQ ID NO: 410259 - DNA, 20 bp, Artificial Sequence
  Description of Artificial Sequence: Synthetic oligonucleotide
  Target: LAMA2; (+) strand; PAM type: YTN; PAM sequence: TTG
ctattaggggtcccaatgca

SEQ ID NO: 410260 - DNA, 20 bp, Artificial Sequence
  Description of Artificial Sequence: Synthetic oligonucleotide
  Target: LAMA2; (+) strand; PAM type: YTN; PAM sequence: CTA
ttaggggtcccaatgcatct

SEQ ID NO: 410261 - DNA, 20 bp, Artificial Sequence
  Description of Artificial Sequence: Synthetic oligonucleotide
  Target: LAMA2; (+) strand; PAM type: YTN; PAM sequence: TTA
ggggtcccaatgcatctaca

SEQ ID NO: 410262 - DNA, 20 bp, Artificial Sequence
  Description of Artificial Sequence: Synthetic oligonucleotide
  Target: LAMA2; (+) strand; PAM type: YTN; PAM sequence: CTA
cattgtctacagctatgcag

SEQ ID NO: 410263 - DNA, 20 bp, Artificial Sequence
  Description of Artificial Sequence: Synthetic oligonucleotide
  Target: LAMA2; (+) strand; PAM type: YTN; PAM sequence: TTG
tctacagctatgcaggggag

SEQ ID NO: 410264 - DNA, 20 bp, Artificial Sequence
  Description of Artificial Sequence: Synthetic oligonucleotide
  Target: LAMA2; (+) strand; PAM type: YTN; PAM sequence: CTA
cagctatgcaggggaggagg

SEQ ID NO: 410265 - DNA, 20 bp, Artificial Sequence
  Description of Artificial Sequence: Synthetic oligonucleotide
  Target: LAMA2; (+) strand; PAM type: YTN; PAM sequence: CTA
tgcaggggaggagggaaaca

SEQ ID NO: 410266 - DNA, 20 bp, Artificial Sequence
  Description of Artificial Sequence: Synthetic oligonucleotide
  Target: LAMA2; (+) strand; PAM type: YTN; PAM sequence: CTT
caacttagactgagaaaagc

SEQ ID NO: 410267 - DNA, 20 bp, Artificial Sequence
  Description of Artificial Sequence: Synthetic oligonucleotide
  Target: LAMA2; (+) strand; PAM type: YTN; PAM sequence: TTC
aacttagactgagaaaagca

SEQ ID NO: 410268 - DNA, 20 bp, Artificial Sequence
  Description of Artificial Sequence: Synthetic oligonucleotide
  Target: LAMA2; (+) strand; PAM type: YTN; PAM sequence: CTT
agactgagaaaagcacacta

SEQ ID NO: 410269 - DNA, 20 bp, Artificial Sequence
  Description of Artificial Sequence: Synthetic oligonucleotide
  Target: LAMA2; (+) strand; PAM type: YTN; PAM sequence: TTA
gactgagaaaagcacactaa

SEQ ID NO: 410270 - DNA, 20 bp, Artificial Sequence
  Description of Artificial Sequence: Synthetic oligonucleotide
  Target: LAMA2; (+) strand; PAM type: YTN; PAM sequence: CTG
agaaaagcacactaatggac

SEQ ID NO: 410271 - DNA, 20 bp, Artificial Sequence
  Description of Artificial Sequence: Synthetic oligonucleotide
  Target: LAMA2; (+) strand; PAM type: YTN; PAM sequence: CTA
atggacttaaaaaggcatgc

SEQ ID NO: 410272 - DNA, 20 bp, Artificial Sequence
  Description of Artificial Sequence: Synthetic oligonucleotide
  Target: LAMA2; (+) strand; PAM type: YTN; PAM sequence: CTT
aaaaaggcatgcggggattg

SEQ ID NO: 410273 - DNA, 20 bp, Artificial Sequence
  Description of Artificial Sequence: Synthetic oligonucleotide
  Target: LAMA2; (+) strand; PAM type: YTN; PAM sequence: TTA
aaaaggcatgcggggattgg

SEQ ID NO: 410274 - DNA, 20 bp, Artificial Sequence
  Description of Artificial Sequence: Synthetic oligonucleotide
  Target: LAMA2; (+) strand; PAM type: YTN; PAM sequence: TTG
ggcttaattgtaaggaagca

SEQ ID NO: 410275 - DNA, 20 bp, Artificial Sequence
  Description of Artificial Sequence: Synthetic oligonucleotide
  Target: LAMA2; (+) strand; PAM type: YTN; PAM sequence: CTT
aattgtaaggaagcaaaaaa

SEQ ID NO: 410276 - DNA, 20 bp, Artificial Sequence
  Description of Artificial Sequence: Synthetic oligonucleotide
  Target: LAMA2; (+) strand; PAM type: YTN; PAM sequence: TTA
attgtaaggaagcaaaaaaa

SEQ ID NO: 410277 - DNA, 20 bp, Artificial Sequence
  Description of Artificial Sequence: Synthetic oligonucleotide
  Target: LAMA2; (+) strand; PAM type: YTN; PAM sequence: TTG
taaggaagcaaaaaaacgaa

SEQ ID NO: 410278 - DNA, 20 bp, Artificial Sequence
  Description of Artificial Sequence: Synthetic oligonucleotide
  Target: LAMA2; (+) strand; PAM type: YTN; PAM sequence: CTT
atttattacattctattagc

SEQ ID NO: 410279 - DNA, 20 bp, Artificial Sequence
  Description of Artificial Sequence: Synthetic oligonucleotide
  Target: LAMA2; (+) strand; PAM type: YTN; PAM sequence: TTA
tttattacattctattagcc

SEQ ID NO: 410280 - DNA, 20 bp, Artificial Sequence
  Description of Artificial Sequence: Synthetic oligonucleotide
  Target: LAMA2; (+) strand; PAM type: YTN; PAM sequence: TTT
attacattctattagcccca

SEQ ID NO: 410281 - DNA, 20 bp, Artificial Sequence
  Description of Artificial Sequence: Synthetic oligonucleotide
  Target: LAMA2; (+) strand; PAM type: YTN; PAM sequence: TTA
ttacattctattagccccat

SEQ ID NO: 410282 - DNA, 20 bp, Artificial Sequence
  Description of Artificial Sequence: Synthetic oligonucleotide
  Target: LAMA2; (+) strand; PAM type: YTN; PAM sequence: TTA
cattctattagccccatgga

SEQ ID NO: 410283 - DNA, 20 bp, Artificial Sequence
  Description of Artificial Sequence: Synthetic oligonucleotide
  Target: LAMA2; (+) strand; PAM type: YTN; PAM sequence: TTC
tattagccccatggactttg

SEQ ID NO: 410284 - DNA, 20 bp, Artificial Sequence
  Description of Artificial Sequence: Synthetic oligonucleotide
  Target: LAMA2; (+) strand; PAM type: YTN; PAM sequence: CTA
ttagccccatggactttgca

SEQ ID NO: 410285 - DNA, 20 bp, Artificial Sequence
  Description of Artificial Sequence: Synthetic oligonucleotide
  Target: LAMA2; (+) strand; PAM type: YTN; PAM sequence: TTA
gccccatggactttgcaagg

SEQ ID NO: 410286 - DNA, 20 bp, Artificial Sequence
  Description of Artificial Sequence: Synthetic oligonucleotide
  Target: LAMA2; (+) strand; PAM type: YTN; PAM sequence: CTT
tgcaaggcctgtgtccttca

SEQ ID NO: 410287 - DNA, 20 bp, Artificial Sequence
  Description of Artificial Sequence: Synthetic oligonucleotide
  Target: LAMA2; (+) strand; PAM type: YTN; PAM sequence: TTT
gcaaggcctgtgtccttcaa

SEQ ID NO: 410288 - DNA, 20 bp, Artificial Sequence
  Description of Artificial Sequence: Synthetic oligonucleotide
  Target: LAMA2; (+) strand; PAM type: YTN; PAM sequence: TTG
caaggcctgtgtccttcaaa

SEQ ID NO: 410289 - DNA, 20 bp, Artificial Sequence
  Description of Artificial Sequence: Synthetic oligonucleotide
  Target: LAMA2; (+) strand; PAM type: YTN; PAM sequence: CTG
tgtccttcaaaaatgctgac

SEQ ID NO: 410290 - DNA, 20 bp, Artificial Sequence
  Description of Artificial Sequence: Synthetic oligonucleotide
  Target: LAMA2; (+) strand; PAM type: YTN; PAM sequence: CTT
caaaaatgctgacattggtc

SEQ ID NO: 410291 - DNA, 20 bp, Artificial Sequence
  Description of Artificial Sequence: Synthetic oligonucleotide
  Target: LAMA2; (+) strand; PAM type: YTN; PAM sequence: TTC
aaaaatgctgacattggtcg

SEQ ID NO: 410292 - DNA, 20 bp, Artificial Sequence
  Description of Artificial Sequence: Synthetic oligonucleotide
  Target: LAMA2; (+) strand; PAM type: YTN; PAM sequence: CTG
acattggtcgctgtgcccat

SEQ ID NO: 410293 - DNA, 20 bp, Artificial Sequence
  Description of Artificial Sequence: Synthetic oligonucleotide
  Target: LAMA2; (+) strand; PAM type: YTN; PAM sequence: TTG
gtcgctgtgcccatcagaaa

SEQ ID NO: 410294 - DNA, 20 bp, Artificial Sequence
  Description of Artificial Sequence: Synthetic oligonucleotide
  Target: LAMA2; (+) strand; PAM type: YTN; PAM sequence: CTG
tgcccatcagaaactccgtg

SEQ ID NO: 410295 - DNA, 20 bp, Artificial Sequence
  Description of Artificial Sequence: Synthetic oligonucleotide
  Target: LAMA2; (+) strand; PAM type: YTN; PAM sequence: CTC
cgtgaagatgaagatggagc

SEQ ID NO: 410296 - DNA, 20 bp, Artificial Sequence
  Description of Artificial Sequence: Synthetic oligonucleotide
  Target: LAMA2; (+) strand; PAM type: YTN; PAM sequence: CTC
cagctgaaatagttatccag

SEQ ID NO: 410297 - DNA, 20 bp, Artificial Sequence
  Description of Artificial Sequence: Synthetic oligonucleotide
  Target: LAMA2; (+) strand; PAM type: YTN; PAM sequence: CTG
aaatagttatccagcctgag

SEQ ID NO: 410298 - DNA, 20 bp, Artificial Sequence
  Description of Artificial Sequence: Synthetic oligonucleotide
  Target: LAMA2; (+) strand; PAM type: YTN; PAM sequence: TTA
tccagcctgagccagttccc

SEQ ID NO: 410299 - DNA, 20 bp, Artificial Sequence
  Description of Artificial Sequence: Synthetic oligonucleotide
  Target: LAMA2; (+) strand; PAM type: YTN; PAM sequence: CTG
agccagttcccaccccagcc

SEQ ID NO: 410300 - DNA, 20 bp, Artificial Sequence
  Description of Artificial Sequence: Synthetic oligonucleotide
  Target: LAMA2; (+) strand; PAM type: YTN; PAM sequence: TTC
ccaccccagcctttcctacg

SEQ ID NO: 410301 - DNA, 20 bp, Artificial Sequence
  Description of Artificial Sequence: Synthetic oligonucleotide
  Target: LAMA2; (+) strand; PAM type: YTN; PAM sequence: CTT
tcctacgcccaccccagttc

SEQ ID NO: 410302 - DNA, 20 bp, Artificial Sequence
  Description of Artificial Sequence: Synthetic oligonucleotide
  Target: LAMA2; (+) strand; PAM type: YTN; PAM sequence: TTT
cctacgcccaccccagttct

SEQ ID NO: 410303 - DNA, 20 bp, Artificial Sequence
  Description of Artificial Sequence: Synthetic oligonucleotide
  Target: LAMA2; (+) strand; PAM type: YTN; PAM sequence: TTC
ctacgcccaccccagttctg

SEQ ID NO: 410304 - DNA, 20 bp, Artificial Sequence
  Description of Artificial Sequence: Synthetic oligonucleotide
  Target: LAMA2; (+) strand; PAM type: YTN; PAM sequence: CTA
cgcccaccccagttctgaca

SEQ ID NO: 410305 - DNA, 20 bp, Artificial Sequence
  Description of Artificial Sequence: Synthetic oligonucleotide
  Target: LAMA2; (+) strand; PAM type: YTN; PAM sequence: TTC
tgacacatgtaagtgtttat

SEQ ID NO: 410306 - DNA, 20 bp, Artificial Sequence
  Description of Artificial Sequence: Synthetic oligonucleotide
  Target: LAMA2; (+) strand; PAM type: YTN; PAM sequence: CTG
acacatgtaagtgtttatat

SEQ ID NO: 410307 - DNA, 20 bp, Artificial Sequence
  Description of Artificial Sequence: Synthetic oligonucleotide
  Target: LAMA2; (+) strand; PAM type: YTN; PAM sequence: TTT
atattatccccattgctttc

SEQ ID NO: 410308 - DNA, 20 bp, Artificial Sequence
  Description of Artificial Sequence: Synthetic oligonucleotide
  Target: LAMA2; (+) strand; PAM type: YTN; PAM sequence: TTA
tattatccccattgctttct

SEQ ID NO: 410309 - DNA, 20 bp, Artificial Sequence
  Description of Artificial Sequence: Synthetic oligonucleotide
  Target: LAMA2; (+) strand; PAM type: YTN; PAM sequence: TTA
tccccattgctttctaattt

SEQ ID NO: 410310 - DNA, 20 bp, Artificial Sequence
  Description of Artificial Sequence: Synthetic oligonucleotide
  Target: LAMA2; (+) strand; PAM type: YTN; PAM sequence: TTG
ctttctaatttttacccagt

SEQ ID NO: 410311 - DNA, 20 bp, Artificial Sequence
  Description of Artificial Sequence: Synthetic oligonucleotide
  Target: LAMA2; (+) strand; PAM type: YTN; PAM sequence: CTT
tctaatttttacccagtatt

SEQ ID NO: 410312 - DNA, 20 bp, Artificial Sequence
  Description of Artificial Sequence: Synthetic oligonucleotide
  Target: LAMA2; (+) strand; PAM type: YTN; PAM sequence: TTT
ctaatttttacccagtattc

SEQ ID NO: 410313 - DNA, 20 bp, Artificial Sequence
  Description of Artificial Sequence: Synthetic oligonucleotide
  Target: LAMA2; (+) strand; PAM type: YTN; PAM sequence: TTC
taatttttacccagtattct

SEQ ID NO: 410314 - DNA, 20 bp, Artificial Sequence
  Description of Artificial Sequence: Synthetic oligonucleotide
  Target: LAMA2; (+) strand; PAM type: YTN; PAM sequence: CTA
atttttacccagtattctga

SEQ ID NO: 410315 - DNA, 20 bp, Artificial Sequence
  Description of Artificial Sequence: Synthetic oligonucleotide
  Target: LAMA2; (+) strand; PAM type: YTN; PAM sequence: TTT
ttacccagtattctgagtca

SEQ ID NO: 410316 - DNA, 20 bp, Artificial Sequence
  Description of Artificial Sequence: Synthetic oligonucleotide
  Target: LAMA2; (+) strand; PAM type: YTN; PAM sequence: TTT
tacccagtattctgagtcat

SEQ ID NO: 410317 - DNA, 20 bp, Artificial Sequence
  Description of Artificial Sequence: Synthetic oligonucleotide
  Target: LAMA2; (+) strand; PAM type: YTN; PAM sequence: TTT
acccagtattctgagtcatt

SEQ ID NO: 410318 - DNA, 20 bp, Artificial Sequence
  Description of Artificial Sequence: Synthetic oligonucleotide
  Target: LAMA2; (+) strand; PAM type: YTN; PAM sequence: TTA
cccagtattctgagtcattt

SEQ ID NO: 410319 - DNA, 20 bp, Artificial Sequence
  Description of Artificial Sequence: Synthetic oligonucleotide
  Target: LAMA2; (+) strand; PAM type: YTN; PAM sequence: TTC
tgagtcatttcagaaggaag

SEQ ID NO: 410320 - DNA, 20 bp, Artificial Sequence
  Description of Artificial Sequence: Synthetic oligonucleotide
  Target: LAMA2; (+) strand; PAM type: YTN; PAM sequence: CTG
agtcatttcagaaggaagat

SEQ ID NO: 410321 - DNA, 20 bp, Artificial Sequence
  Description of Artificial Sequence: Synthetic oligonucleotide
  Target: LAMA2; (+) strand; PAM type: YTN; PAM sequence: TTT
cagaaggaagattattcagg

SEQ ID NO: 410322 - DNA, 20 bp, Artificial Sequence
  Description of Artificial Sequence: Synthetic oligonucleotide
  Target: LAMA2; (+) strand; PAM type: YTN; PAM sequence: TTC
agaaggaagattattcagga

SEQ ID NO: 410323 - DNA, 20 bp, Artificial Sequence
  Description of Artificial Sequence: Synthetic oligonucleotide
  Target: LAMA2; (+) strand; PAM type: YTN; PAM sequence: TTA
ttcaggatatctagtacact

SEQ ID NO: 410324 - DNA, 20 bp, Artificial Sequence
  Description of Artificial Sequence: Synthetic oligonucleotide
  Target: LAMA2; (+) strand; PAM type: YTN; PAM sequence: TTC
aggatatctagtacactctg

SEQ ID NO: 410325 - DNA, 20 bp, Artificial Sequence
  Description of Artificial Sequence: Synthetic oligonucleotide
  Target: LAMA2; (+) strand; PAM type: YTN; PAM sequence: CTA
gtacactctgatattagaat

SEQ ID NO: 410326 - DNA, 20 bp, Artificial Sequence
  Description of Artificial Sequence: Synthetic oligonucleotide
  Target: LAMA2; (+) strand; PAM type: YTN; PAM sequence: CTC
tgatattagaattgaaagaa

SEQ ID NO: 410327 - DNA, 20 bp, Artificial Sequence
  Description of Artificial Sequence: Synthetic oligonucleotide
  Target: LAMA2; (+) strand; PAM type: YTN; PAM sequence: CTG
atattagaattgaaagaaat

SEQ ID NO: 410328 - DNA, 20 bp, Artificial Sequence
  Description of Artificial Sequence: Synthetic oligonucleotide
  Target: LAMA2; (+) strand; PAM type: YTN; PAM sequence: TTA
gaattgaaagaaatataacc

SEQ ID NO: 410329 - DNA, 20 bp, Artificial Sequence
  Description of Artificial Sequence: Synthetic oligonucleotide
  Target: LAMA2; (+) strand; PAM type: YTN; PAM sequence: TTG
aaagaaatataacctatcta

SEQ ID NO: 410330 - DNA, 20 bp, Artificial Sequence
  Description of Artificial Sequence: Synthetic oligonucleotide
  Target: LAMA2; (+) strand; PAM type: YTN; PAM sequence: CTA
tctaaacctattcttacatc

SEQ ID NO: 410331 - DNA, 20 bp, Artificial Sequence
  Description of Artificial Sequence: Synthetic oligonucleotide
  Target: LAMA2; (+) strand; PAM type: YTN; PAM sequence: CTA
aacctattcttacatcttca

SEQ ID NO: 410332 - DNA, 20 bp, Artificial Sequence
  Description of Artificial Sequence: Synthetic oligonucleotide
  Target: LAMA2; (+) strand; PAM type: YTN; PAM sequence: CTA
ttcttacatcttcattgaat

SEQ ID NO: 410333 - DNA, 20 bp, Artificial Sequence
  Description of Artificial Sequence: Synthetic oligonucleotide
  Target: LAMA2; (+) strand; PAM type: YTN; PAM sequence: TTC
ttacatcttcattgaatgac

SEQ ID NO: 410334 - DNA, 20 bp, Artificial Sequence
  Description of Artificial Sequence: Synthetic oligonucleotide
  Target: LAMA2; (+) strand; PAM type: YTN; PAM sequence: CTT
acatcttcattgaatgactt

SEQ ID NO: 410335 - DNA, 20 bp, Artificial Sequence
  Description of Artificial Sequence: Synthetic oligonucleotide
  Target: LAMA2; (+) strand; PAM type: YTN; PAM sequence: TTA
catcttcattgaatgactta

SEQ ID NO: 410336 - DNA, 20 bp, Artificial Sequence
  Description of Artificial Sequence: Synthetic oligonucleotide
  Target: LAMA2; (+) strand; PAM type: YTN; PAM sequence: CTT
cattgaatgacttacctata

SEQ ID NO: 410337 - DNA, 20 bp, Artificial Sequence
  Description of Artificial Sequence: Synthetic oligonucleotide
  Target: LAMA2; (+) strand; PAM type: YTN; PAM sequence: TTC
attgaatgacttacctatat

SEQ ID NO: 410338 - DNA, 20 bp, Artificial Sequence
  Description of Artificial Sequence: Synthetic oligonucleotide
  Target: LAMA2; (+) strand; PAM type: YTN; PAM sequence: TTG
aatgacttacctatatttcc

SEQ ID NO: 410339 - DNA, 20 bp, Artificial Sequence
  Description of Artificial Sequence: Synthetic oligonucleotide
  Target: LAMA2; (+) strand; PAM type: YTN; PAM sequence: CTT
acctatatttccatcttcaa

SEQ ID NO: 410340 - DNA, 20 bp, Artificial Sequence
  Description of Artificial Sequence: Synthetic oligonucleotide
  Target: LAMA2; (+) strand; PAM type: YTN; PAM sequence: TTA
cctatatttccatcttcaat

SEQ ID NO: 410341 - DNA, 20 bp, Artificial Sequence
  Description of Artificial Sequence: Synthetic oligonucleotide
  Target: LAMA2; (+) strand; PAM type: YTN; PAM sequence: CTA
tatttccatcttcaattttg

SEQ ID NO: 410342 - DNA, 20 bp, Artificial Sequence
  Description of Artificial Sequence: Synthetic oligonucleotide
  Target: LAMA2; (+) strand; PAM type: YTN; PAM sequence: TTT
ccatcttcaattttgtttac

SEQ ID NO: 410343 - DNA, 20 bp, Artificial Sequence
  Description of Artificial Sequence: Synthetic oligonucleotide
  Target: LAMA2; (+) strand; PAM type: YTN; PAM sequence: TTC
catcttcaattttgtttaca

SEQ ID NO: 410344 - DNA, 20 bp, Artificial Sequence
  Description of Artificial Sequence: Synthetic oligonucleotide
  Target: LAMA2; (+) strand; PAM type: YTN; PAM sequence: CTT
caattttgtttacaaaacag

SEQ ID NO: 410345 - DNA, 20 bp, Artificial Sequence
  Description of Artificial Sequence: Synthetic oligonucleotide
  Target: LAMA2; (+) strand; PAM type: YTN; PAM sequence: TTC
aattttgtttacaaaacagt

SEQ ID NO: 410346 - DNA, 20 bp, Artificial Sequence
  Description of Artificial Sequence: Synthetic oligonucleotide
  Target: LAMA2; (+) strand; PAM type: YTN; PAM sequence: TTT
tgtttacaaaacagtacatt

SEQ ID NO: 410347 - DNA, 20 bp, Artificial Sequence
  Description of Artificial Sequence: Synthetic oligonucleotide
  Target: LAMA2; (+) strand; PAM type: YTN; PAM sequence: TTT
gtttacaaaacagtacattt

SEQ ID NO: 410348 - DNA, 20 bp, Artificial Sequence
  Description of Artificial Sequence: Synthetic oligonucleotide
  Target: LAMA2; (+) strand; PAM type: YTN; PAM sequence: TTG
tttacaaaacagtacatttt

SEQ ID NO: 410349 - DNA, 20 bp, Artificial Sequence
  Description of Artificial Sequence: Synthetic oligonucleotide
  Target: LAMA2; (+) strand; PAM type: YTN; PAM sequence: TTT
acaaaacagtacattttcag

SEQ ID NO: 410350 - DNA, 20 bp, Artificial Sequence
  Description of Artificial Sequence: Synthetic oligonucleotide
  Target: LAMA2; (+) strand; PAM type: YTN; PAM sequence: TTA
caaaacagtacattttcagt

SEQ ID NO: 410351 - DNA, 20 bp, Artificial Sequence
  Description of Artificial Sequence: Synthetic oligonucleotide
  Target: LAMA2; (+) strand; PAM type: YTN; PAM sequence: TTT
tcagttgaaatgttggaaaa

SEQ ID NO: 410352 - DNA, 20 bp, Artificial Sequence
  Description of Artificial Sequence: Synthetic oligonucleotide
  Target: LAMA2; (+) strand; PAM type: YTN; PAM sequence: TTT
cagttgaaatgttggaaaac

SEQ ID NO: 410353 - DNA, 20 bp, Artificial Sequence
  Description of Artificial Sequence: Synthetic oligonucleotide
  Target: LAMA2; (+) strand; PAM type: YTN; PAM sequence: TTC
agttgaaatgttggaaaaca

SEQ ID NO: 410354 - DNA, 20 bp, Artificial Sequence
  Description of Artificial Sequence: Synthetic oligonucleotide
  Target: LAMA2; (+) strand; PAM type: YTN; PAM sequence: TTG
aaatgttggaaaacacagaa

SEQ ID NO: 410355 - DNA, 20 bp, Artificial Sequence
  Description of Artificial Sequence: Synthetic oligonucleotide
  Target: LAMA2; (+) strand; PAM type: YTN; PAM sequence: TTG
gaaaacacagaaatatccag

SEQ ID NO: 410356 - DNA, 20 bp, Artificial Sequence
  Description of Artificial Sequence: Synthetic oligonucleotide
  Target: LAMA2; (+) strand; PAM type: YTN; PAM sequence: CTT
ataataccatgacagaggca

SEQ ID NO: 410357 - DNA, 20 bp, Artificial Sequence
  Description of Artificial Sequence: Synthetic oligonucleotide
  Target: LAMA2; (+) strand; PAM type: YTN; PAM sequence: TTA
taataccatgacagaggcaa

SEQ ID NO: 410358 - DNA, 20 bp, Artificial Sequence
  Description of Artificial Sequence: Synthetic oligonucleotide
  Target: LAMA2; (+) strand; PAM type: YTN; PAM sequence: TTG
gtttccaggcccttttatct

SEQ ID NO: 410359 - DNA, 20 bp, Artificial Sequence
  Description of Artificial Sequence: Synthetic oligonucleotide
  Target: LAMA2; (+) strand; PAM type: YTN; PAM sequence: TTT
ccaggcccttttatctgcat

SEQ ID NO: 410360 - DNA, 20 bp, Artificial Sequence
  Description of Artificial Sequence: Synthetic oligonucleotide
  Target: LAMA2; (+) strand; PAM type: YTN; PAM sequence: TTC
caggcccttttatctgcata

SEQ ID NO: 410361 - DNA, 20 bp, Artificial Sequence
  Description of Artificial Sequence: Synthetic oligonucleotide
  Target: LAMA2; (+) strand; PAM type: YTN; PAM sequence: CTT
ttatctgcatagtagatgtc

SEQ ID NO: 410362 - DNA, 20 bp, Artificial Sequence
  Description of Artificial Sequence: Synthetic oligonucleotide
  Target: LAMA2; (+) strand; PAM type: YTN; PAM sequence: TTT
tatctgcatagtagatgtcc

SEQ ID NO: 410363 - DNA, 20 bp, Artificial Sequence
  Description of Artificial Sequence: Synthetic oligonucleotide
  Target: LAMA2; (+) strand; PAM type: YTN; PAM sequence: TTT
atctgcatagtagatgtcct

SEQ ID NO: 410364 - DNA, 20 bp, Artificial Sequence
  Description of Artificial Sequence: Synthetic oligonucleotide
  Target: LAMA2; (+) strand; PAM type: YTN; PAM sequence: TTA
tctgcatagtagatgtccta

SEQ ID NO: 410365 - DNA, 20 bp, Artificial Sequence
  Description of Artificial Sequence: Synthetic oligonucleotide
  Target: LAMA2; (+) strand; PAM type: YTN; PAM sequence: CTG
catagtagatgtcctacctt

SEQ ID NO: 410366 - DNA, 20 bp, Artificial Sequence
  Description of Artificial Sequence: Synthetic oligonucleotide
  Target: LAMA2; (+) strand; PAM type: YTN; PAM sequence: CTA
ccttgtatacaatttggtgt

SEQ ID NO: 410367 - DNA, 20 bp, Artificial Sequence
  Description of Artificial Sequence: Synthetic oligonucleotide
  Target: LAMA2; (+) strand; PAM type: YTN; PAM sequence: CTT
gtatacaatttggtgtcctg

SEQ ID NO: 410368 - DNA, 20 bp, Artificial Sequence
  Description of Artificial Sequence: Synthetic oligonucleotide
  Target: LAMA2; (+) strand; PAM type: YTN; PAM sequence: TTG
tatacaatttggtgtcctgt

SEQ ID NO: 410369 - DNA, 20 bp, Artificial Sequence
  Description of Artificial Sequence: Synthetic oligonucleotide
  Target: LAMA2; (+) strand; PAM type: YTN; PAM sequence: TTT
ggtgtcctgtttttagaaac

SEQ ID NO: 410370 - DNA, 20 bp, Artificial Sequence
  Description of Artificial Sequence: Synthetic oligonucleotide
  Target: LAMA2; (+) strand; PAM type: YTN; PAM sequence: TTG
gtgtcctgtttttagaaact

SEQ ID NO: 410371 - DNA, 20 bp, Artificial Sequence
  Description of Artificial Sequence: Synthetic oligonucleotide
  Target: LAMA2; (+) strand; PAM type: YTN; PAM sequence: CTG
tttttagaaactagtaatac

SEQ ID NO: 410372 - DNA, 20 bp, Artificial Sequence
  Description of Artificial Sequence: Synthetic oligonucleotide
  Target: LAMA2; (+) strand; PAM type: YTN; PAM sequence: TTT
ttagaaactagtaatacacc

SEQ ID NO: 410373 - DNA, 20 bp, Artificial Sequence
  Description of Artificial Sequence: Synthetic oligonucleotide
  Target: LAMA2; (+) strand; PAM type: YTN; PAM sequence: TTT
tagaaactagtaatacacca

SEQ ID NO: 410374 - DNA, 20 bp, Artificial Sequence
  Description of Artificial Sequence: Synthetic oligonucleotide
  Target: LAMA2; (+) strand; PAM type: YTN; PAM sequence: TTT
agaaactagtaatacaccac

SEQ ID NO: 410375 - DNA, 20 bp, Artificial Sequence
  Description of Artificial Sequence: Synthetic oligonucleotide
  Target: LAMA2; (+) strand; PAM type: YTN; PAM sequence: TTA
gaaactagtaatacaccact

SEQ ID NO: 410376 - DNA, 20 bp, Artificial Sequence
  Description of Artificial Sequence: Synthetic oligonucleotide
  Target: LAMA2; (+) strand; PAM type: YTN; PAM sequence: CTA
gtaatacaccactaaaactg

SEQ ID NO: 410377 - DNA, 20 bp, Artificial Sequence
  Description of Artificial Sequence: Synthetic oligonucleotide
  Target: LAMA2; (+) strand; PAM type: YTN; PAM sequence: CTA
aaactgtttctaggccaggc

SEQ ID NO: 410378 - DNA, 20 bp, Artificial Sequence
  Description of Artificial Sequence: Synthetic oligonucleotide
  Target: LAMA2; (+) strand; PAM type: YTN; PAM sequence: CTG
tttctaggccaggcgcggtg

SEQ ID NO: 410379 - DNA, 20 bp, Artificial Sequence
  Description of Artificial Sequence: Synthetic oligonucleotide
  Target: LAMA2; (+) strand; PAM type: YTN; PAM sequence: TTT
ctaggccaggcgcggtggct

SEQ ID NO: 410380 - DNA, 20 bp, Artificial Sequence
  Description of Artificial Sequence: Synthetic oligonucleotide
  Target: LAMA2; (+) strand; PAM type: YTN; PAM sequence: TTC
taggccaggcgcggtggctc

SEQ ID NO: 410381 - DNA, 20 bp, Artificial Sequence
  Description of Artificial Sequence: Synthetic oligonucleotide
  Target: LAMA2; (+) strand; PAM type: YTN; PAM sequence: CTA
ggccaggcgcggtggctcac

SEQ ID NO: 410382 - DNA, 20 bp, Artificial Sequence
  Description of Artificial Sequence: Synthetic oligonucleotide
  Target: LAMA2; (+) strand; PAM type: YTN; PAM sequence: CTC
acgcctgtaatcctagcact

SEQ ID NO: 410383 - DNA, 20 bp, Artificial Sequence
  Description of Artificial Sequence: Synthetic oligonucleotide
  Target: LAMA2; (+) strand; PAM type: YTN; PAM sequence: CTG
taatcctagcactttgggag

SEQ ID NO: 410384 - DNA, 20 bp, Artificial Sequence
  Description of Artificial Sequence: Synthetic oligonucleotide
  Target: LAMA2; (+) strand; PAM type: YTN; PAM sequence: CTA
gcactttgggaggccaaggc

SEQ ID NO: 410385 - DNA, 20 bp, Artificial Sequence
  Description of Artificial Sequence: Synthetic oligonucleotide
  Target: LAMA2; (+) strand; PAM type: YTN; PAM sequence: CTT
tgggaggccaaggcaggcag

SEQ ID NO: 410386 - DNA, 20 bp, Artificial Sequence
  Description of Artificial Sequence: Synthetic oligonucleotide
  Target: LAMA2; (+) strand; PAM type: YTN; PAM sequence: TTT
gggaggccaaggcaggcaga

SEQ ID NO: 410387 - DNA, 20 bp, Artificial Sequence
  Description of Artificial Sequence: Synthetic oligonucleotide
  Target: LAMA2; (+) strand; PAM type: YTN; PAM sequence: TTG
ggaggccaaggcaggcagat

SEQ ID NO: 410388 - DNA, 20 bp, Artificial Sequence
  Description of Artificial Sequence: Synthetic oligonucleotide
  Target: LAMA2; (+) strand; PAM type: YTN; PAM sequence: TTG
cctgagctcaggagttcgag

SEQ ID NO: 410389 - DNA, 20 bp, Artificial Sequence
  Description of Artificial Sequence: Synthetic oligonucleotide
  Target: LAMA2; (+) strand; PAM type: YTN; PAM sequence: CTG
agctcaggagttcgagacca

SEQ ID NO: 410390 - DNA, 20 bp, Artificial Sequence
  Description of Artificial Sequence: Synthetic oligonucleotide
  Target: LAMA2; (+) strand; PAM type: YTN; PAM sequence: CTC
aggagttcgagaccagcctg

SEQ ID NO: 410391 - DNA, 20 bp, Artificial Sequence
  Description of Artificial Sequence: Synthetic oligonucleotide
  Target: LAMA2; (+) strand; PAM type: YTN; PAM sequence: TTC
gagaccagcctgggcaacca

SEQ ID NO: 410392 - DNA, 20 bp, Artificial Sequence
  Description of Artificial Sequence: Synthetic oligonucleotide
  Target: LAMA2; (+) strand; PAM type: YTN; PAM sequence: CTG
ggcaaccacggtgaaacccc

SEQ ID NO: 410393 - DNA, 20 bp, Artificial Sequence
  Description of Artificial Sequence: Synthetic oligonucleotide
  Target: LAMA2; (+) strand; PAM type: YTN; PAM sequence: CTC
ttctaaaatacaaaaaaata

SEQ ID NO: 410394 - DNA, 20 bp, Artificial Sequence
  Description of Artificial Sequence: Synthetic oligonucleotide
  Target: LAMA2; (+) strand; PAM type: YTN; PAM sequence: CTT
ctaaaatacaaaaaaatagc

SEQ ID NO: 410395 - DNA, 20 bp, Artificial Sequence
  Description of Artificial Sequence: Synthetic oligonucleotide
  Target: LAMA2; (+) strand; PAM type: YTN; PAM sequence: TTC
taaaatacaaaaaaatagcc

SEQ ID NO: 410396 - DNA, 20 bp, Artificial Sequence
  Description of Artificial Sequence: Synthetic oligonucleotide
  Target: LAMA2; (+) strand; PAM type: YTN; PAM sequence: CTA
aaatacaaaaaaatagcctg

SEQ ID NO: 410397 - DNA, 20 bp, Artificial Sequence
  Description of Artificial Sequence: Synthetic oligonucleotide
  Target: LAMA2; (+) strand; PAM type: YTN; PAM sequence: CTG
gcatggcggtgtgcacctgt

SEQ ID NO: 410398 - DNA, 20 bp, Artificial Sequence
  Description of Artificial Sequence: Synthetic oligonucleotide
  Target: LAMA2; (+) strand; PAM type: YTN; PAM sequence: CTG
tagtcccagctactcagtag

SEQ ID NO: 410399 - DNA, 20 bp, Artificial Sequence
  Description of Artificial Sequence: Synthetic oligonucleotide
  Target: LAMA2; (+) strand; PAM type: YTN; PAM sequence: CTA
ctcagtaggctgaggcagga

SEQ ID NO: 410400 - DNA, 20 bp, Artificial Sequence
  Description of Artificial Sequence: Synthetic oligonucleotide
  Target: LAMA2; (+) strand; PAM type: YTN; PAM sequence: CTC
agtaggctgaggcaggagaa

SEQ ID NO: 410401 - DNA, 20 bp, Artificial Sequence
  Description of Artificial Sequence: Synthetic oligonucleotide
  Target: LAMA2; (+) strand; PAM type: YTN; PAM sequence: CTG
aggcaggagaatcgcttgaa

SEQ ID NO: 410402 - DNA, 20 bp, Artificial Sequence
  Description of Artificial Sequence: Synthetic oligonucleotide
  Target: LAMA2; (+) strand; PAM type: YTN; PAM sequence: CTT
gaacccaggaggcggaggtt

SEQ ID NO: 410403 - DNA, 20 bp, Artificial Sequence
  Description of Artificial Sequence: Synthetic oligonucleotide
  Target: LAMA2; (+) strand; PAM type: YTN; PAM sequence: TTG
aacccaggaggcggaggttg

SEQ ID NO: 410404 - DNA, 20 bp, Artificial Sequence
  Description of Artificial Sequence: Synthetic oligonucleotide
  Target: LAMA2; (+) strand; PAM type: YTN; PAM sequence: TTG
cagtgagccgagatcacgcc

SEQ ID NO: 410405 - DNA, 20 bp, Artificial Sequence
  Description of Artificial Sequence: Synthetic oligonucleotide
  Target: LAMA2; (+) strand; PAM type: YTN; PAM sequence: CTG
tactccagcctgggcaacag

SEQ ID NO: 410406 - DNA, 20 bp, Artificial Sequence
  Description of Artificial Sequence: Synthetic oligonucleotide
  Target: LAMA2; (+) strand; PAM type: YTN; PAM sequence: CTC
cagcctgggcaacagagcga

SEQ ID NO: 410407 - DNA, 20 bp, Artificial Sequence
  Description of Artificial Sequence: Synthetic oligonucleotide
  Target: LAMA2; (+) strand; PAM type: YTN; PAM sequence: CTG
ggcaacagagcgagactcca

SEQ ID NO: 410408 - DNA, 20 bp, Artificial Sequence
  Description of Artificial Sequence: Synthetic oligonucleotide
  Target: LAMA2; (+) strand; PAM type: YTN; PAM sequence: CTC
catctccaaaaaataaaaat

SEQ ID NO: 410409 - DNA, 20 bp, Artificial Sequence
  Description of Artificial Sequence: Synthetic oligonucleotide
  Target: LAMA2; (+) strand; PAM type: YTN; PAM sequence: CTC
caaaaaataaaaataaataa

SEQ ID NO: 410410 - DNA, 20 bp, Artificial Sequence
  Description of Artificial Sequence: Synthetic oligonucleotide
  Target: LAMA2; (+) strand; PAM type: YTN; PAM sequence: CTG
tatctaaacatcatataaat

SEQ ID NO: 410411 - DNA, 20 bp, Artificial Sequence
  Description of Artificial Sequence: Synthetic oligonucleotide
  Target: LAMA2; (+) strand; PAM type: YTN; PAM sequence: CTA
aacatcatataaatgtgtat

SEQ ID NO: 410412 - DNA, 20 bp, Artificial Sequence
  Description of Artificial Sequence: Synthetic oligonucleotide
  Target: LAMA2; (+) strand; PAM type: YTN; PAM sequence: CTA
atatgattttatgttaagta

SEQ ID NO: 410413 - DNA, 20 bp, Artificial Sequence
  Description of Artificial Sequence: Synthetic oligonucleotide
  Target: LAMA2; (+) strand; PAM type: YTN; PAM sequence: TTT
tatgttaagtatatatacac

SEQ ID NO: 410414 - DNA, 20 bp, Artificial Sequence
  Description of Artificial Sequence: Synthetic oligonucleotide
  Target: LAMA2; (+) strand; PAM type: YTN; PAM sequence: TTT
atgttaagtatatatacaca

SEQ ID NO: 410415 - DNA, 20 bp, Artificial Sequence
  Description of Artificial Sequence: Synthetic oligonucleotide
  Target: LAMA2; (+) strand; PAM type: YTN; PAM sequence: TTA
tgttaagtatatatacacac

SEQ ID NO: 410416 - DNA, 20 bp, Artificial Sequence
  Description of Artificial Sequence: Synthetic oligonucleotide
  Target: LAMA2; (+) strand; PAM type: YTN; PAM sequence: TTA
agtatatatacacacagaga

SEQ ID NO: 410417 - DNA, 20 bp, Artificial Sequence
  Description of Artificial Sequence: Synthetic oligonucleotide
  Target: LAMA2; (+) strand; PAM type: YTN; PAM sequence: CTA
ttttatagtattggaggtca

SEQ ID NO: 410418 - DNA, 20 bp, Artificial Sequence
  Description of Artificial Sequence: Synthetic oligonucleotide
  Target: LAMA2; (+) strand; PAM type: YTN; PAM sequence: TTT
tatagtattggaggtcatat

SEQ ID NO: 410419 - DNA, 20 bp, Artificial Sequence
  Description of Artificial Sequence: Synthetic oligonucleotide
  Target: LAMA2; (+) strand; PAM type: YTN; PAM sequence: TTT
atagtattggaggtcatata

SEQ ID NO: 410420 - DNA, 20 bp, Artificial Sequence
  Description of Artificial Sequence: Synthetic oligonucleotide
  Target: LAMA2; (+) strand; PAM type: YTN; PAM sequence: TTA
tagtattggaggtcatatag

SEQ ID NO: 410421 - DNA, 20 bp, Artificial Sequence
  Description of Artificial Sequence: Synthetic oligonucleotide
  Target: LAMA2; (+) strand; PAM type: YTN; PAM sequence: TTG
gaggtcatatagccttgatt

SEQ ID NO: 410422 - DNA, 20 bp, Artificial Sequence
  Description of Artificial Sequence: Synthetic oligonucleotide
  Target: LAMA2; (+) strand; PAM type: YTN; PAM sequence: CTT
gattagagcatgggctcaag

SEQ ID NO: 410423 - DNA, 20 bp, Artificial Sequence
  Description of Artificial Sequence: Synthetic oligonucleotide
  Target: LAMA2; (+) strand; PAM type: YTN; PAM sequence: TTG
attagagcatgggctcaagt

SEQ ID NO: 410424 - DNA, 20 bp, Artificial Sequence
  Description of Artificial Sequence: Synthetic oligonucleotide
  Target: LAMA2; (+) strand; PAM type: YTN; PAM sequence: TTA
gagcatgggctcaagtcaga

SEQ ID NO: 410425 - DNA, 20 bp, Artificial Sequence
  Description of Artificial Sequence: Synthetic oligonucleotide
  Target: LAMA2; (+) strand; PAM type: YTN; PAM sequence: CTC
aagtcagactgctggtattc

SEQ ID NO: 410426 - DNA, 20 bp, Artificial Sequence
  Description of Artificial Sequence: Synthetic oligonucleotide
  Target: LAMA2; (+) strand; PAM type: YTN; PAM sequence: CTG
ctggtattcaaatcccagca

SEQ ID NO: 410427 - DNA, 20 bp, Artificial Sequence
  Description of Artificial Sequence: Synthetic oligonucleotide
  Target: LAMA2; (+) strand; PAM type: YTN; PAM sequence: CTG
gtattcaaatcccagcactg

SEQ ID NO: 410428 - DNA, 20 bp, Artificial Sequence
  Description of Artificial Sequence: Synthetic oligonucleotide
  Target: LAMA2; (+) strand; PAM type: YTN; PAM sequence: TTC
aaatcccagcactgtaaccg

SEQ ID NO: 410429 - DNA, 20 bp, Artificial Sequence
  Description of Artificial Sequence: Synthetic oligonucleotide
  Target: LAMA2; (+) strand; PAM type: YTN; PAM sequence: CTG
taaccgaccatctgtgtgaa

SEQ ID NO: 410430 - DNA, 20 bp, Artificial Sequence
  Description of Artificial Sequence: Synthetic oligonucleotide
  Target: LAMA2; (+) strand; PAM type: YTN; PAM sequence: CTG
tgtgaatttgggaaagctac

SEQ ID NO: 410431 - DNA, 20 bp, Artificial Sequence
  Description of Artificial Sequence: Synthetic oligonucleotide
  Target: LAMA2; (+) strand; PAM type: YTN; PAM sequence: TTT
gggaaagctacctgtccaat

SEQ ID NO: 410432 - DNA, 20 bp, Artificial Sequence
  Description of Artificial Sequence: Synthetic oligonucleotide
  Target: LAMA2; (+) strand; PAM type: YTN; PAM sequence: TTG
ggaaagctacctgtccaatc

SEQ ID NO: 410433 - DNA, 20 bp, Artificial Sequence
  Description of Artificial Sequence: Synthetic oligonucleotide
  Target: LAMA2; (+) strand; PAM type: YTN; PAM sequence: CTA
cctgtccaatctatttctca

SEQ ID NO: 410434 - DNA, 20 bp, Artificial Sequence
  Description of Artificial Sequence: Synthetic oligonucleotide
  Target: LAMA2; (+) strand; PAM type: YTN; PAM sequence: CTG
tccaatctatttctcagttt

SEQ ID NO: 410435 - DNA, 20 bp, Artificial Sequence
  Description of Artificial Sequence: Synthetic oligonucleotide
  Target: LAMA2; (+) strand; PAM type: YTN; PAM sequence: CTA
tttctcagtttcccatccaa

SEQ ID NO: 410436 - DNA, 20 bp, Artificial Sequence
  Description of Artificial Sequence: Synthetic oligonucleotide
  Target: LAMA2; (+) strand; PAM type: YTN; PAM sequence: TTT
ctcagtttcccatccaagta

SEQ ID NO: 410437 - DNA, 20 bp, Artificial Sequence
  Description of Artificial Sequence: Synthetic oligonucleotide
  Target: LAMA2; (+) strand; PAM type: YTN; PAM sequence: TTC
tcagtttcccatccaagtac

SEQ ID NO: 410438 - DNA, 20 bp, Artificial Sequence
  Description of Artificial Sequence: Synthetic oligonucleotide
  Target: LAMA2; (+) strand; PAM type: YTN; PAM sequence: CTC
agtttcccatccaagtacta

SEQ ID NO: 410439 - DNA, 20 bp, Artificial Sequence
  Description of Artificial Sequence: Synthetic oligonucleotide
  Target: LAMA2; (+) strand; PAM type: YTN; PAM sequence: TTT
cccatccaagtactaaccgg

SEQ ID NO: 410440 - DNA, 20 bp, Artificial Sequence
  Description of Artificial Sequence: Synthetic oligonucleotide
  Target: LAMA2; (+) strand; PAM type: YTN; PAM sequence: TTC
ccatccaagtactaaccggg

SEQ ID NO: 410441 - DNA, 20 bp, Artificial Sequence
  Description of Artificial Sequence: Synthetic oligonucleotide
  Target: LAMA2; (+) strand; PAM type: YTN; PAM sequence: CTA
accgggcccaaccctgctta

SEQ ID NO: 410442 - DNA, 20 bp, Artificial Sequence
  Description of Artificial Sequence: Synthetic oligonucleotide
  Target: LAMA2; (+) strand; PAM type: YTN; PAM sequence: CTG
cttagcttttgagatcagaa

SEQ ID NO: 410443 - DNA, 20 bp, Artificial Sequence
  Description of Artificial Sequence: Synthetic oligonucleotide
  Target: LAMA2; (+) strand; PAM type: YTN; PAM sequence: CTT
agcttttgagatcagaaaag

SEQ ID NO: 410444 - DNA, 20 bp, Artificial Sequence
  Description of Artificial Sequence: Synthetic oligonucleotide
  Target: LAMA2; (+) strand; PAM type: YTN; PAM sequence: TTA
gcttttgagatcagaaaaga

SEQ ID NO: 410445 - DNA, 20 bp, Artificial Sequence
  Description of Artificial Sequence: Synthetic oligonucleotide
  Target: LAMA2; (+) strand; PAM type: YTN; PAM sequence: CTT
ttgagatcagaaaagatcgg

SEQ ID NO: 410446 - DNA, 20 bp, Artificial Sequence
  Description of Artificial Sequence: Synthetic oligonucleotide
  Target: LAMA2; (+) strand; PAM type: YTN; PAM sequence: TTT
tgagatcagaaaagatcgga

SEQ ID NO: 410447 - DNA, 20 bp, Artificial Sequence
  Description of Artificial Sequence: Synthetic oligonucleotide
  Target: LAMA2; (+) strand; PAM type: YTN; PAM sequence: TTT
gagatcagaaaagatcggat

SEQ ID NO: 410448 - DNA, 20 bp, Artificial Sequence
  Description of Artificial Sequence: Synthetic oligonucleotide
  Target: LAMA2; (+) strand; PAM type: YTN; PAM sequence: TTG
agatcagaaaagatcggatg

SEQ ID NO: 410449 - DNA, 20 bp, Artificial Sequence
  Description of Artificial Sequence: Synthetic oligonucleotide
  Target: LAMA2; (+) strand; PAM type: YTN; PAM sequence: CTT
tcagggtgatttggccatag

SEQ ID NO: 410450 - DNA, 20 bp, Artificial Sequence
  Description of Artificial Sequence: Synthetic oligonucleotide
  Target: LAMA2; (+) strand; PAM type: YTN; PAM sequence: TTT
cagggtgatttggccataga

SEQ ID NO: 410451 - DNA, 20 bp, Artificial Sequence
  Description of Artificial Sequence: Synthetic oligonucleotide
  Target: LAMA2; (+) strand; PAM type: YTN; PAM sequence: TTC
agggtgatttggccatagac

SEQ ID NO: 410452 - DNA, 20 bp, Artificial Sequence
  Description of Artificial Sequence: Synthetic oligonucleotide
  Target: LAMA2; (+) strand; PAM type: YTN; PAM sequence: TTT
ggccatagactatttctgtt

SEQ ID NO: 410453 - DNA, 20 bp, Artificial Sequence
  Description of Artificial Sequence: Synthetic oligonucleotide
  Target: LAMA2; (+) strand; PAM type: YTN; PAM sequence: TTG
gccatagactatttctgttt

SEQ ID NO: 410454 - DNA, 20 bp, Artificial Sequence
  Description of Artificial Sequence: Synthetic oligonucleotide
  Target: LAMA2; (+) strand; PAM type: YTN; PAM sequence: CTA
tttctgtttcctcatctgtc

SEQ ID NO: 410455 - DNA, 20 bp, Artificial Sequence
  Description of Artificial Sequence: Synthetic oligonucleotide
  Target: LAMA2; (+) strand; PAM type: YTN; PAM sequence: TTT
ctgtttcctcatctgtcaaa

SEQ ID NO: 410456 - DNA, 20 bp, Artificial Sequence
  Description of Artificial Sequence: Synthetic oligonucleotide
  Target: LAMA2; (+) strand; PAM type: YTN; PAM sequence: TTC
tgtttcctcatctgtcaaat

SEQ ID NO: 410457 - DNA, 20 bp, Artificial Sequence
  Description of Artificial Sequence: Synthetic oligonucleotide
  Target: LAMA2; (+) strand; PAM type: YTN; PAM sequence: CTG
tttcctcatctgtcaaatga

SEQ ID NO: 410458 - DNA, 20 bp, Artificial Sequence
  Description of Artificial Sequence: Synthetic oligonucleotide
  Target: LAMA2; (+) strand; PAM type: YTN; PAM sequence: TTT
cctcatctgtcaaatgagga

SEQ ID NO: 410459 - DNA, 20 bp, Artificial Sequence
  Description of Artificial Sequence: Synthetic oligonucleotide
  Target: LAMA2; (+) strand; PAM type: YTN; PAM sequence: TTC
ctcatctgtcaaatgaggat

SEQ ID NO: 410460 - DNA, 20 bp, Artificial Sequence
  Description of Artificial Sequence: Synthetic oligonucleotide
  Target: LAMA2; (+) strand; PAM type: YTN; PAM sequence: CTC
atctgtcaaatgaggatatt

SEQ ID NO: 410461 - DNA, 20 bp, Artificial Sequence
  Description of Artificial Sequence: Synthetic oligonucleotide
  Target: LAMA2; (+) strand; PAM type: YTN; PAM sequence: CTG
tcaaatgaggatattaacag

SEQ ID NO: 410462 - DNA, 20 bp, Artificial Sequence
  Description of Artificial Sequence: Synthetic oligonucleotide
  Target: LAMA2; (+) strand; PAM type: YTN; PAM sequence: TTA
acagcacagacatcaaagac

SEQ ID NO: 410463 - DNA, 20 bp, Artificial Sequence
  Description of Artificial Sequence: Synthetic oligonucleotide
  Target: LAMA2; (+) strand; PAM type: YTN; PAM sequence: CTT
tgtatcagagttttaaaaga

SEQ ID NO: 410464 - DNA, 20 bp, Artificial Sequence
  Description of Artificial Sequence: Synthetic oligonucleotide
  Target: LAMA2; (+) strand; PAM type: YTN; PAM sequence: TTT
gtatcagagttttaaaagat

SEQ ID NO: 410465 - DNA, 20 bp, Artificial Sequence
  Description of Artificial Sequence: Synthetic oligonucleotide
  Target: LAMA2; (+) strand; PAM type: YTN; PAM sequence: TTG
tatcagagttttaaaagata

SEQ ID NO: 410466 - DNA, 20 bp, Artificial Sequence
  Description of Artificial Sequence: Synthetic oligonucleotide
  Target: LAMA2; (+) strand; PAM type: YTN; PAM sequence: TTT
taaaagataatgtttgttca

SEQ ID NO: 410467 - DNA, 20 bp, Artificial Sequence
  Description of Artificial Sequence: Synthetic oligonucleotide
  Target: LAMA2; (+) strand; PAM type: YTN; PAM sequence: TTT
aaaagataatgtttgttcaa

SEQ ID NO: 410468 - DNA, 20 bp, Artificial Sequence
  Description of Artificial Sequence: Synthetic oligonucleotide
  Target: LAMA2; (+) strand; PAM type: YTN; PAM sequence: TTA
aaagataatgtttgttcaat

SEQ ID NO: 410469 - DNA, 20 bp, Artificial Sequence
  Description of Artificial Sequence: Synthetic oligonucleotide
  Target: LAMA2; (+) strand; PAM type: YTN; PAM sequence: TTT
gttcaatgactcacatatac

SEQ ID NO: 410470 - DNA, 20 bp, Artificial Sequence
  Description of Artificial Sequence: Synthetic oligonucleotide
  Target: LAMA2; (+) strand; PAM type: YTN; PAM sequence: TTG
ttcaatgactcacatatact

SEQ ID NO: 410471 - DNA, 20 bp, Artificial Sequence
  Description of Artificial Sequence: Synthetic oligonucleotide
  Target: LAMA2; (+) strand; PAM type: YTN; PAM sequence: TTC
aatgactcacatatactgaa

SEQ ID NO: 410472 - DNA, 20 bp, Artificial Sequence
  Description of Artificial Sequence: Synthetic oligonucleotide
  Target: LAMA2; (+) strand; PAM type: YTN; PAM sequence: CTC
acatatactgaacgtttaat

SEQ ID NO: 410473 - DNA, 20 bp, Artificial Sequence
  Description of Artificial Sequence: Synthetic oligonucleotide
  Target: LAMA2; (+) strand; PAM type: YTN; PAM sequence: CTG
aacgtttaataaatggcata

SEQ ID NO: 410474 - DNA, 20 bp, Artificial Sequence
  Description of Artificial Sequence: Synthetic oligonucleotide
  Target: LAMA2; (+) strand; PAM type: YTN; PAM sequence: TTT
aataaatggcataagtacta

SEQ ID NO: 410475 - DNA, 20 bp, Artificial Sequence
  Description of Artificial Sequence: Synthetic oligonucleotide
  Target: LAMA2; (+) strand; PAM type: YTN; PAM sequence: TTA
ataaatggcataagtactat

SEQ ID NO: 410476 - DNA, 20 bp, Artificial Sequence
  Description of Artificial Sequence: Synthetic oligonucleotide
  Target: LAMA2; (+) strand; PAM type: YTN; PAM sequence: CTA
tgtagtaatgataataatga

SEQ ID NO: 410477 - DNA, 20 bp, Artificial Sequence
  Description of Artificial Sequence: Synthetic oligonucleotide
  Target: LAMA2; (+) strand; PAM type: YTN; PAM sequence: CTT
tcaccagcccagggctaaac

SEQ ID NO: 410478 - DNA, 20 bp, Artificial Sequence
  Description of Artificial Sequence: Synthetic oligonucleotide
  Target: LAMA2; (+) strand; PAM type: YTN; PAM sequence: TTT
caccagcccagggctaaaca

SEQ ID NO: 410479 - DNA, 20 bp, Artificial Sequence
  Description of Artificial Sequence: Synthetic oligonucleotide
  Target: LAMA2; (+) strand; PAM type: YTN; PAM sequence: TTC
accagcccagggctaaacaa

SEQ ID NO: 410480 - DNA, 20 bp, Artificial Sequence
  Description of Artificial Sequence: Synthetic oligonucleotide
  Target: LAMA2; (+) strand; PAM type: YTN; PAM sequence: CTA
aacaattttcattcaatatt

SEQ ID NO: 410481 - DNA, 20 bp, Artificial Sequence
  Description of Artificial Sequence: Synthetic oligonucleotide
  Target: LAMA2; (+) strand; PAM type: YTN; PAM sequence: TTT
tcattcaatattatatgtaa

SEQ ID NO: 410482 - DNA, 20 bp, Artificial Sequence
  Description of Artificial Sequence: Synthetic oligonucleotide
  Target: LAMA2; (+) strand; PAM type: YTN; PAM sequence: TTT
cattcaatattatatgtaat

SEQ ID NO: 410483 - DNA, 20 bp, Artificial Sequence
  Description of Artificial Sequence: Synthetic oligonucleotide
  Target: LAMA2; (+) strand; PAM type: YTN; PAM sequence: TTC
attcaatattatatgtaatt

SEQ ID NO: 410484 - DNA, 20 bp, Artificial Sequence
  Description of Artificial Sequence: Synthetic oligonucleotide
  Target: LAMA2; (+) strand; PAM type: YTN; PAM sequence: TTC
aatattatatgtaattctca

SEQ ID NO: 410485 - DNA, 20 bp, Artificial Sequence
  Description of Artificial Sequence: Synthetic oligonucleotide
  Target: LAMA2; (+) strand; PAM type: YTN; PAM sequence: TTA
tatgtaattctcataacggc

SEQ ID NO: 410486 - DNA, 20 bp, Artificial Sequence
  Description of Artificial Sequence: Synthetic oligonucleotide
  Target: LAMA2; (+) strand; PAM type: YTN; PAM sequence: TTC
tcataacggctctgtaaaat

SEQ ID NO: 410487 - DNA, 20 bp, Artificial Sequence
  Description of Artificial Sequence: Synthetic oligonucleotide
  Target: LAMA2; (+) strand; PAM type: YTN; PAM sequence: CTC
ataacggctctgtaaaatat

SEQ ID NO: 410488 - DNA, 20 bp, Artificial Sequence
  Description of Artificial Sequence: Synthetic oligonucleotide
  Target: LAMA2; (+) strand; PAM type: YTN; PAM sequence: CTC
tgtaaaatatagtctttcta

SEQ ID NO: 410489 - DNA, 20 bp, Artificial Sequence
  Description of Artificial Sequence: Synthetic oligonucleotide
  Target: LAMA2; (+) strand; PAM type: YTN; PAM sequence: CTG
taaaatatagtctttctact

SEQ ID NO: 410490 - DNA, 20 bp, Artificial Sequence
  Description of Artificial Sequence: Synthetic oligonucleotide
  Target: LAMA2; (+) strand; PAM type: YTN; PAM sequence: CTT
tctacttttagtcgagttaa

SEQ ID NO: 410491 - DNA, 20 bp, Artificial Sequence
  Description of Artificial Sequence: Synthetic oligonucleotide
  Target: LAMA2; (+) strand; PAM type: YTN; PAM sequence: TTT
ctacttttagtcgagttaat

SEQ ID NO: 410492 - DNA, 20 bp, Artificial Sequence
  Description of Artificial Sequence: Synthetic oligonucleotide
  Target: LAMA2; (+) strand; PAM type: YTN; PAM sequence: TTC
tacttttagtcgagttaata

SEQ ID NO: 410493 - DNA, 20 bp, Artificial Sequence
  Description of Artificial Sequence: Synthetic oligonucleotide
  Target: LAMA2; (+) strand; PAM type: YTN; PAM sequence: CTA
cttttagtcgagttaataag

SEQ ID NO: 410494 - DNA, 20 bp, Artificial Sequence
  Description of Artificial Sequence: Synthetic oligonucleotide
  Target: LAMA2; (+) strand; PAM type: YTN; PAM sequence: CTT
ttagtcgagttaataagaat

SEQ ID NO: 410495 - DNA, 20 bp, Artificial Sequence
  Description of Artificial Sequence: Synthetic oligonucleotide
  Target: LAMA2; (+) strand; PAM type: YTN; PAM sequence: TTT
tagtcgagttaataagaatt

SEQ ID NO: 410496 - DNA, 20 bp, Artificial Sequence
  Description of Artificial Sequence: Synthetic oligonucleotide
  Target: LAMA2; (+) strand; PAM type: YTN; PAM sequence: TTT
agtcgagttaataagaatta

SEQ ID NO: 410497 - DNA, 20 bp, Artificial Sequence
  Description of Artificial Sequence: Synthetic oligonucleotide
  Target: LAMA2; (+) strand; PAM type: YTN; PAM sequence: TTA
gtcgagttaataagaattag

SEQ ID NO: 410498 - DNA, 20 bp, Artificial Sequence
  Description of Artificial Sequence: Synthetic oligonucleotide
  Target: LAMA2; (+) strand; PAM type: YTN; PAM sequence: TTA
ataagaattagctatcttaa

SEQ ID NO: 410499 - DNA, 20 bp, Artificial Sequence
  Description of Artificial Sequence: Synthetic oligonucleotide
  Target: LAMA2; (+) strand; PAM type: YTN; PAM sequence: TTA
gctatcttaagcaaccaacc

SEQ ID NO: 410500 - DNA, 20 bp, Artificial Sequence
  Description of Artificial Sequence: Synthetic oligonucleotide
  Target: LAMA2; (+) strand; PAM type: YTN; PAM sequence: CTA
tcttaagcaaccaacccact

SEQ ID NO: 410501 - DNA, 20 bp, Artificial Sequence
  Description of Artificial Sequence: Synthetic oligonucleotide
  Target: LAMA2; (+) strand; PAM type: YTN; PAM sequence: CTT
aagcaaccaacccactcaca

SEQ ID NO: 410502 - DNA, 20 bp, Artificial Sequence
  Description of Artificial Sequence: Synthetic oligonucleotide
  Target: LAMA2; (+) strand; PAM type: YTN; PAM sequence: TTA
agcaaccaacccactcacac

SEQ ID NO: 410503 - DNA, 20 bp, Artificial Sequence
  Description of Artificial Sequence: Synthetic oligonucleotide
  Target: LAMA2; (+) strand; PAM type: YTN; PAM sequence: CTC
acaccactagtaaaaggcag

SEQ ID NO: 410504 - DNA, 20 bp, Artificial Sequence
  Description of Artificial Sequence: Synthetic oligonucleotide
  Target: LAMA2; (+) strand; PAM type: YTN; PAM sequence: CTA
gtaaaaggcagagtaagaat

SEQ ID NO: 410505 - DNA, 20 bp, Artificial Sequence
  Description of Artificial Sequence: Synthetic oligonucleotide
  Target: LAMA2; (+) strand; PAM type: YTN; PAM sequence: TTT
tattctagcgagtcagactc

SEQ ID NO: 410506 - DNA, 20 bp, Artificial Sequence
  Description of Artificial Sequence: Synthetic oligonucleotide
  Target: LAMA2; (+) strand; PAM type: YTN; PAM sequence: TTT
attctagcgagtcagactcc

SEQ ID NO: 410507 - DNA, 20 bp, Artificial Sequence
  Description of Artificial Sequence: Synthetic oligonucleotide
  Target: LAMA2; (+) strand; PAM type: YTN; PAM sequence: TTA
ttctagcgagtcagactcca

SEQ ID NO: 410508 - DNA, 20 bp, Artificial Sequence
  Description of Artificial Sequence: Synthetic oligonucleotide
  Target: LAMA2; (+) strand; PAM type: YTN; PAM sequence: TTC
tagcgagtcagactccaaag

SEQ ID NO: 410509 - DNA, 20 bp, Artificial Sequence
  Description of Artificial Sequence: Synthetic oligonucleotide
  Target: LAMA2; (+) strand; PAM type: YTN; PAM sequence: CTA
gcgagtcagactccaaagtc

SEQ ID NO: 410510 - DNA, 20 bp, Artificial Sequence
  Description of Artificial Sequence: Synthetic oligonucleotide
  Target: LAMA2; (+) strand; PAM type: YTN; PAM sequence: CTC
caaagtctgactccttatct

SEQ ID NO: 410511 - DNA, 20 bp, Artificial Sequence
  Description of Artificial Sequence: Synthetic oligonucleotide
  Target: LAMA2; (+) strand; PAM type: YTN; PAM sequence: CTG
actccttatctctggaacac

SEQ ID NO: 410512 - DNA, 20 bp, Artificial Sequence
  Description of Artificial Sequence: Synthetic oligonucleotide
  Target: LAMA2; (+) strand; PAM type: YTN; PAM sequence: CTC
cttatctctggaacactctg

SEQ ID NO: 410513 - DNA, 20 bp, Artificial Sequence
  Description of Artificial Sequence: Synthetic oligonucleotide
  Target: LAMA2; (+) strand; PAM type: YTN; PAM sequence: CTT
atctctggaacactctgcct

SEQ ID NO: 410514 - DNA, 20 bp, Artificial Sequence
  Description of Artificial Sequence: Synthetic oligonucleotide
  Target: LAMA2; (+) strand; PAM type: YTN; PAM sequence: TTA
tctctggaacactctgcctt

SEQ ID NO: 410515 - DNA, 20 bp, Artificial Sequence
  Description of Artificial Sequence: Synthetic oligonucleotide
  Target: LAMA2; (+) strand; PAM type: YTN; PAM sequence: CTC
tggaacactctgcctttcca

SEQ ID NO: 410516 - DNA, 20 bp, Artificial Sequence
  Description of Artificial Sequence: Synthetic oligonucleotide
  Target: LAMA2; (+) strand; PAM type: YTN; PAM sequence: CTG
gaacactctgcctttccaat

SEQ ID NO: 410517 - DNA, 20 bp, Artificial Sequence
  Description of Artificial Sequence: Synthetic oligonucleotide
  Target: LAMA2; (+) strand; PAM type: YTN; PAM sequence: CTC
tgcctttccaatttattcta

SEQ ID NO: 410518 - DNA, 20 bp, Artificial Sequence
  Description of Artificial Sequence: Synthetic oligonucleotide
  Target: LAMA2; (+) strand; PAM type: YTN; PAM sequence: CTG
cctttccaatttattctact

SEQ ID NO: 410519 - DNA, 20 bp, Artificial Sequence
  Description of Artificial Sequence: Synthetic oligonucleotide
  Target: LAMA2; (+) strand; PAM type: YTN; PAM sequence: CTT
tccaatttattctactttta

SEQ ID NO: 410520 - DNA, 20 bp, Artificial Sequence
  Description of Artificial Sequence: Synthetic oligonucleotide
  Target: LAMA2; (+) strand; PAM type: YTN; PAM sequence: TTT
ccaatttattctacttttaa

SEQ ID NO: 410521 - DNA, 20 bp, Artificial Sequence
  Description of Artificial Sequence: Synthetic oligonucleotide
  Target: LAMA2; (+) strand; PAM type: YTN; PAM sequence: TTC
caatttattctacttttaat

SEQ ID NO: 410522 - DNA, 20 bp, Artificial Sequence
  Description of Artificial Sequence: Synthetic oligonucleotide
  Target: LAMA2; (+) strand; PAM type: YTN; PAM sequence: TTT
attctacttttaatagacca

SEQ ID NO: 410523 - DNA, 20 bp, Artificial Sequence
  Description of Artificial Sequence: Synthetic oligonucleotide
  Target: LAMA2; (+) strand; PAM type: YTN; PAM sequence: TTA
ttctacttttaatagaccat

SEQ ID NO: 410524 - DNA, 20 bp, Artificial Sequence
  Description of Artificial Sequence: Synthetic oligonucleotide
  Target: LAMA2; (+) strand; PAM type: YTN; PAM sequence: TTC
tacttttaatagaccatggt

SEQ ID NO: 410525 - DNA, 20 bp, Artificial Sequence
  Description of Artificial Sequence: Synthetic oligonucleotide
  Target: LAMA2; (+) strand; PAM type: YTN; PAM sequence: CTA
cttttaatagaccatggtag

SEQ ID NO: 410526 - DNA, 20 bp, Artificial Sequence
  Description of Artificial Sequence: Synthetic oligonucleotide
  Target: LAMA2; (+) strand; PAM type: YTN; PAM sequence: CTT
ttaatagaccatggtaggct

SEQ ID NO: 410527 - DNA, 20 bp, Artificial Sequence
  Description of Artificial Sequence: Synthetic oligonucleotide
  Target: LAMA2; (+) strand; PAM type: YTN; PAM sequence: TTT
taatagaccatggtaggcta

SEQ ID NO: 410528 - DNA, 20 bp, Artificial Sequence
  Description of Artificial Sequence: Synthetic oligonucleotide
  Target: LAMA2; (+) strand; PAM type: YTN; PAM sequence: TTT
aatagaccatggtaggctat

SEQ ID NO: 410529 - DNA, 20 bp, Artificial Sequence
  Description of Artificial Sequence: Synthetic oligonucleotide
  Target: LAMA2; (+) strand; PAM type: YTN; PAM sequence: TTA
atagaccatggtaggctatt

SEQ ID NO: 410530 - DNA, 20 bp, Artificial Sequence
  Description of Artificial Sequence: Synthetic oligonucleotide
  Target: LAMA2; (+) strand; PAM type: YTN; PAM sequence: CTA
ttgagagtgtttccagtttt

SEQ ID NO: 410531 - DNA, 20 bp, Artificial Sequence
  Description of Artificial Sequence: Synthetic oligonucleotide
  Target: LAMA2; (+) strand; PAM type: YTN; PAM sequence: TTG
agagtgtttccagtttttca

SEQ ID NO: 410532 - DNA, 20 bp, Artificial Sequence
  Description of Artificial Sequence: Synthetic oligonucleotide
  Target: LAMA2; (+) strand; PAM type: YTN; PAM sequence: TTT
ccagtttttcactattagaa

SEQ ID NO: 410533 - DNA, 20 bp, Artificial Sequence
  Description of Artificial Sequence: Synthetic oligonucleotide
  Target: LAMA2; (+) strand; PAM type: YTN; PAM sequence: TTC
cagtttttcactattagaaa

SEQ ID NO: 410534 - DNA, 20 bp, Artificial Sequence
  Description of Artificial Sequence: Synthetic oligonucleotide
  Target: LAMA2; (+) strand; PAM type: YTN; PAM sequence: TTT
ttcactattagaaactatac

SEQ ID NO: 410535 - DNA, 20 bp, Artificial Sequence
  Description of Artificial Sequence: Synthetic oligonucleotide
  Target: LAMA2; (+) strand; PAM type: YTN; PAM sequence: TTT
tcactattagaaactatact

SEQ ID NO: 410536 - DNA, 20 bp, Artificial Sequence
  Description of Artificial Sequence: Synthetic oligonucleotide
  Target: LAMA2; (+) strand; PAM type: YTN; PAM sequence: TTT
cactattagaaactatactc

SEQ ID NO: 410537 - DNA, 20 bp, Artificial Sequence
  Description of Artificial Sequence: Synthetic oligonucleotide
  Target: LAMA2; (+) strand; PAM type: YTN; PAM sequence: TTC
actattagaaactatactct

SEQ ID NO: 410538 - DNA, 20 bp, Artificial Sequence
  Description of Artificial Sequence: Synthetic oligonucleotide
  Target: LAMA2; (+) strand; PAM type: YTN; PAM sequence: CTA
ttagaaactatactctgatg

SEQ ID NO: 410539 - DNA, 20 bp, Artificial Sequence
  Description of Artificial Sequence: Synthetic oligonucleotide
  Target: LAMA2; (+) strand; PAM type: YTN; PAM sequence: TTA
gaaactatactctgatgagc

SEQ ID NO: 410540 - DNA, 20 bp, Artificial Sequence
  Description of Artificial Sequence: Synthetic oligonucleotide
  Target: LAMA2; (+) strand; PAM type: YTN; PAM sequence: CTA
tactctgatgagctcctcta

SEQ ID NO: 410541 - DNA, 20 bp, Artificial Sequence
  Description of Artificial Sequence: Synthetic oligonucleotide
  Target: LAMA2; (+) strand; PAM type: YTN; PAM sequence: CTC
tgatgagctcctctatgcat

SEQ ID NO: 410542 - DNA, 20 bp, Artificial Sequence
  Description of Artificial Sequence: Synthetic oligonucleotide
  Target: LAMA2; (+) strand; PAM type: YTN; PAM sequence: CTG
atgagctcctctatgcatca

SEQ ID NO: 410543 - DNA, 20 bp, Artificial Sequence
  Description of Artificial Sequence: Synthetic oligonucleotide
  Target: LAMA2; (+) strand; PAM type: YTN; PAM sequence: CTC
ctctatgcatcaagcttttt

SEQ ID NO: 410544 - DNA, 20 bp, Artificial Sequence
  Description of Artificial Sequence: Synthetic oligonucleotide
  Target: LAMA2; (+) strand; PAM type: YTN; PAM sequence: CTC
tatgcatcaagctttttcat

SEQ ID NO: 410545 - DNA, 20 bp, Artificial Sequence
  Description of Artificial Sequence: Synthetic oligonucleotide
  Target: LAMA2; (+) strand; PAM type: YTN; PAM sequence: CTA
tgcatcaagctttttcatta

SEQ ID NO: 410546 - DNA, 20 bp, Artificial Sequence
  Description of Artificial Sequence: Synthetic oligonucleotide
  Target: LAMA2; (+) strand; PAM type: YTN; PAM sequence: CTT
tttcattatttccagttatt

SEQ ID NO: 410547 - DNA, 20 bp, Artificial Sequence
  Description of Artificial Sequence: Synthetic oligonucleotide
  Target: LAMA2; (+) strand; PAM type: YTN; PAM sequence: TTT
ttcattatttccagttattc

SEQ ID NO: 410548 - DNA, 20 bp, Artificial Sequence
  Description of Artificial Sequence: Synthetic oligonucleotide
  Target: LAMA2; (+) strand; PAM type: YTN; PAM sequence: TTT
tcattatttccagttattct

SEQ ID NO: 410549 - DNA, 20 bp, Artificial Sequence
  Description of Artificial Sequence: Synthetic oligonucleotide
  Target: LAMA2; (+) strand; PAM type: YTN; PAM sequence: TTT
cattatttccagttattctt

SEQ ID NO: 410550 - DNA, 20 bp, Artificial Sequence
  Description of Artificial Sequence: Synthetic oligonucleotide
  Target: LAMA2; (+) strand; PAM type: YTN; PAM sequence: TTC
attatttccagttattctta

SEQ ID NO: 410551 - DNA, 20 bp, Artificial Sequence
  Description of Artificial Sequence: Synthetic oligonucleotide
  Target: LAMA2; (+) strand; PAM type: YTN; PAM sequence: TTA
tttccagttattcttaaaat

SEQ ID NO: 410552 - DNA, 20 bp, Artificial Sequence
  Description of Artificial Sequence: Synthetic oligonucleotide
  Target: LAMA2; (+) strand; PAM type: YTN; PAM sequence: TTT
ccagttattcttaaaataga

SEQ ID NO: 410553 - DNA, 20 bp, Artificial Sequence
  Description of Artificial Sequence: Synthetic oligonucleotide
  Target: LAMA2; (+) strand; PAM type: YTN; PAM sequence: TTC
cagttattcttaaaatagat

SEQ ID NO: 410554 - DNA, 20 bp, Artificial Sequence
  Description of Artificial Sequence: Synthetic oligonucleotide
  Target: LAMA2; (+) strand; PAM type: YTN; PAM sequence: TTA
ttcttaaaatagataagtag

SEQ ID NO: 410555 - DNA, 20 bp, Artificial Sequence
  Description of Artificial Sequence: Synthetic oligonucleotide
  Target: LAMA2; (+) strand; PAM type: YTN; PAM sequence: TTC
ttaaaatagataagtagtta

SEQ ID NO: 410556 - DNA, 20 bp, Artificial Sequence
  Description of Artificial Sequence: Synthetic oligonucleotide
  Target: LAMA2; (+) strand; PAM type: YTN; PAM sequence: CTT
aaaatagataagtagttagg

SEQ ID NO: 410557 - DNA, 20 bp, Artificial Sequence
  Description of Artificial Sequence: Synthetic oligonucleotide
  Target: LAMA2; (+) strand; PAM type: YTN; PAM sequence: TTA
aaatagataagtagttagga

SEQ ID NO: 410558 - DNA, 20 bp, Artificial Sequence
  Description of Artificial Sequence: Synthetic oligonucleotide
  Target: LAMA2; (+) strand; PAM type: YTN; PAM sequence: TTA
ggaaattataaggccaaaag

SEQ ID NO: 410559 - DNA, 20 bp, Artificial Sequence
  Description of Artificial Sequence: Synthetic oligonucleotide
  Target: LAMA2; (+) strand; PAM type: YTN; PAM sequence: TTA
taaggccaaaagatgaatat

SEQ ID NO: 410560 - DNA, 20 bp, Artificial Sequence
  Description of Artificial Sequence: Synthetic oligonucleotide
  Target: LAMA2; (+) strand; PAM type: YTN; PAM sequence: CTA
aggttttcaatacacatacc

SEQ ID NO: 410561 - DNA, 20 bp, Artificial Sequence
  Description of Artificial Sequence: Synthetic oligonucleotide
  Target: LAMA2; (+) strand; PAM type: YTN; PAM sequence: TTT
tcaatacacatacctgaatt

SEQ ID NO: 410562 - DNA, 20 bp, Artificial Sequence
  Description of Artificial Sequence: Synthetic oligonucleotide
  Target: LAMA2; (+) strand; PAM type: YTN; PAM sequence: TTT
caatacacatacctgaattg

SEQ ID NO: 410563 - DNA, 20 bp, Artificial Sequence
  Description of Artificial Sequence: Synthetic oligonucleotide
  Target: LAMA2; (+) strand; PAM type: YTN; PAM sequence: TTC
aatacacatacctgaattgt

SEQ ID NO: 410564 - DNA, 20 bp, Artificial Sequence
  Description of Artificial Sequence: Synthetic oligonucleotide
  Target: LAMA2; (+) strand; PAM type: YTN; PAM sequence: CTG
aattgtttcttccacaggct

SEQ ID NO: 410565 - DNA, 20 bp, Artificial Sequence
  Description of Artificial Sequence: Synthetic oligonucleotide
  Target: LAMA2; (+) strand; PAM type: YTN; PAM sequence: TTG
tttcttccacaggctatgcc

SEQ ID NO: 410566 - DNA, 20 bp, Artificial Sequence
  Description of Artificial Sequence: Synthetic oligonucleotide
  Target: LAMA2; (+) strand; PAM type: YTN; PAM sequence: TTT
cttccacaggctatgccaat

SEQ ID NO: 410567 - DNA, 20 bp, Artificial Sequence
  Description of Artificial Sequence: Synthetic oligonucleotide
  Target: LAMA2; (+) strand; PAM type: YTN; PAM sequence: TTC
ttccacaggctatgccaatt

SEQ ID NO: 410568 - DNA, 20 bp, Artificial Sequence
  Description of Artificial Sequence: Synthetic oligonucleotide
  Target: LAMA2; (+) strand; PAM type: YTN; PAM sequence: CTT
ccacaggctatgccaattta

SEQ ID NO: 410569 - DNA, 20 bp, Artificial Sequence
  Description of Artificial Sequence: Synthetic oligonucleotide
  Target: LAMA2; (+) strand; PAM type: YTN; PAM sequence: TTC
cacaggctatgccaatttac

SEQ ID NO: 410570 - DNA, 20 bp, Artificial Sequence
  Description of Artificial Sequence: Synthetic oligonucleotide
  Target: LAMA2; (+) strand; PAM type: YTN; PAM sequence: CTA
tgccaatttacattcttatc

SEQ ID NO: 410571 - DNA, 20 bp, Artificial Sequence
  Description of Artificial Sequence: Synthetic oligonucleotide
  Target: LAMA2; (+) strand; PAM type: YTN; PAM sequence: TTT
acattcttatcaccaataca

SEQ ID NO: 410572 - DNA, 20 bp, Artificial Sequence
  Description of Artificial Sequence: Synthetic oligonucleotide
  Target: LAMA2; (+) strand; PAM type: YTN; PAM sequence: TTA
cattcttatcaccaatacaa

SEQ ID NO: 410573 - DNA, 20 bp, Artificial Sequence
  Description of Artificial Sequence: Synthetic oligonucleotide
  Target: LAMA2; (+) strand; PAM type: YTN; PAM sequence: TTC
ttatcaccaatacaacaaag

SEQ ID NO: 410574 - DNA, 20 bp, Artificial Sequence
  Description of Artificial Sequence: Synthetic oligonucleotide
  Target: LAMA2; (+) strand; PAM type: YTN; PAM sequence: CTT
atcaccaatacaacaaagat

SEQ ID NO: 410575 - DNA, 20 bp, Artificial Sequence
  Description of Artificial Sequence: Synthetic oligonucleotide
  Target: LAMA2; (+) strand; PAM type: YTN; PAM sequence: TTA
tcaccaatacaacaaagatg

SEQ ID NO: 410576 - DNA, 20 bp, Artificial Sequence
  Description of Artificial Sequence: Synthetic oligonucleotide
  Target: LAMA2; (+) strand; PAM type: YTN; PAM sequence: CTA
cactctttacagctcatgtg

SEQ ID NO: 410577 - DNA, 20 bp, Artificial Sequence
  Description of Artificial Sequence: Synthetic oligonucleotide
  Target: LAMA2; (+) strand; PAM type: YTN; PAM sequence: CTC
tttacagctcatgtgttgtg

SEQ ID NO: 410578 - DNA, 20 bp, Artificial Sequence
  Description of Artificial Sequence: Synthetic oligonucleotide
  Target: LAMA2; (+) strand; PAM type: YTN; PAM sequence: CTT
tacagctcatgtgttgtggt

SEQ ID NO: 410579 - DNA, 20 bp, Artificial Sequence
  Description of Artificial Sequence: Synthetic oligonucleotide
  Target: LAMA2; (+) strand; PAM type: YTN; PAM sequence: TTT
acagctcatgtgttgtggtt

SEQ ID NO: 410580 - DNA, 20 bp, Artificial Sequence
  Description of Artificial Sequence: Synthetic oligonucleotide
  Target: LAMA2; (+) strand; PAM type: YTN; PAM sequence: TTA
cagctcatgtgttgtggtta

SEQ ID NO: 410581 - DNA, 20 bp, Artificial Sequence
  Description of Artificial Sequence: Synthetic oligonucleotide
  Target: LAMA2; (+) strand; PAM type: YTN; PAM sequence: CTC
atgtgttgtggttatattcc

SEQ ID NO: 410582 - DNA, 20 bp, Artificial Sequence
  Description of Artificial Sequence: Synthetic oligonucleotide
  Target: LAMA2; (+) strand; PAM type: YTN; PAM sequence: TTG
tggttatattccataccagt

SEQ ID NO: 410583 - DNA, 20 bp, Artificial Sequence
  Description of Artificial Sequence: Synthetic oligonucleotide
  Target: LAMA2; (+) strand; PAM type: YTN; PAM sequence: TTA
tattccataccagtaatggg

SEQ ID NO: 410584 - DNA, 20 bp, Artificial Sequence
  Description of Artificial Sequence: Synthetic oligonucleotide
  Target: LAMA2; (+) strand; PAM type: YTN; PAM sequence: TTC
cataccagtaatgggtgggc

SEQ ID NO: 410585 - DNA, 20 bp, Artificial Sequence
  Description of Artificial Sequence: Synthetic oligonucleotide
  Target: LAMA2; (+) strand; PAM type: YTN; PAM sequence: TTG
tcttgagtgcagatcttgaa

SEQ ID NO: 410586 - DNA, 20 bp, Artificial Sequence
  Description of Artificial Sequence: Synthetic oligonucleotide
  Target: LAMA2; (+) strand; PAM type: YTN; PAM sequence: CTT
gagtgcagatcttgaaaact

SEQ ID NO: 410587 - DNA, 20 bp, Artificial Sequence
  Description of Artificial Sequence: Synthetic oligonucleotide
  Target: LAMA2; (+) strand; PAM type: YTN; PAM sequence: TTG
agtgcagatcttgaaaactc

SEQ ID NO: 410588 - DNA, 20 bp, Artificial Sequence
  Description of Artificial Sequence: Synthetic oligonucleotide
  Target: LAMA2; (+) strand; PAM type: YTN; PAM sequence: CTT
gaaaactcttgaatatctca

SEQ ID NO: 410589 - DNA, 20 bp, Artificial Sequence
  Description of Artificial Sequence: Synthetic oligonucleotide
  Target: LAMA2; (+) strand; PAM type: YTN; PAM sequence: TTG
aaaactcttgaatatctcat

SEQ ID NO: 410590 - DNA, 20 bp, Artificial Sequence
  Description of Artificial Sequence: Synthetic oligonucleotide
  Target: LAMA2; (+) strand; PAM type: YTN; PAM sequence: CTC
ttgaatatctcattctcttc

SEQ ID NO: 410591 - DNA, 20 bp, Artificial Sequence
  Description of Artificial Sequence: Synthetic oligonucleotide
  Target: LAMA2; (+) strand; PAM type: YTN; PAM sequence: CTT
gaatatctcattctcttcct

SEQ ID NO: 410592 - DNA, 20 bp, Artificial Sequence
  Description of Artificial Sequence: Synthetic oligonucleotide
  Target: LAMA2; (+) strand; PAM type: YTN; PAM sequence: TTG
aatatctcattctcttcctt

SEQ ID NO: 410593 - DNA, 20 bp, Artificial Sequence
  Description of Artificial Sequence: Synthetic oligonucleotide
  Target: LAMA2; (+) strand; PAM type: YTN; PAM sequence: CTC
attctcttccttagtgtcca

SEQ ID NO: 410594 - DNA, 20 bp, Artificial Sequence
  Description of Artificial Sequence: Synthetic oligonucleotide
  Target: LAMA2; (+) strand; PAM type: YTN; PAM sequence: TTC
tcttccttagtgtccacgat

SEQ ID NO: 410595 - DNA, 20 bp, Artificial Sequence
  Description of Artificial Sequence: Synthetic oligonucleotide
  Target: LAMA2; (+) strand; PAM type: YTN; PAM sequence: CTC
ttccttagtgtccacgatgg

SEQ ID NO: 410596 - DNA, 20 bp, Artificial Sequence
  Description of Artificial Sequence: Synthetic oligonucleotide
  Target: LAMA2; (+) strand; PAM type: YTN; PAM sequence: CTT
ccttagtgtccacgatggaa

SEQ ID NO: 410597 - DNA, 20 bp, Artificial Sequence
  Description of Artificial Sequence: Synthetic oligonucleotide
  Target: LAMA2; (+) strand; PAM type: YTN; PAM sequence: TTC
cttagtgtccacgatggaat

SEQ ID NO: 410598 - DNA, 20 bp, Artificial Sequence
  Description of Artificial Sequence: Synthetic oligonucleotide
  Target: LAMA2; (+) strand; PAM type: YTN; PAM sequence: CTT
agtgtccacgatggaattgg

SEQ ID NO: 410599 - DNA, 20 bp, Artificial Sequence
  Description of Artificial Sequence: Synthetic oligonucleotide
  Target: LAMA2; (+) strand; PAM type: YTN; PAM sequence: TTA
gtgtccacgatggaattggt

SEQ ID NO: 410600 - DNA, 20 bp, Artificial Sequence
  Description of Artificial Sequence: Synthetic oligonucleotide
  Target: LAMA2; (+) strand; PAM type: YTN; PAM sequence: TTG
gttgagcaatgtgctccttg

SEQ ID NO: 410601 - DNA, 20 bp, Artificial Sequence
  Description of Artificial Sequence: Synthetic oligonucleotide
  Target: LAMA2; (+) strand; PAM type: YTN; PAM sequence: TTG
agcaatgtgctccttgcact

SEQ ID NO: 410602 - DNA, 20 bp, Artificial Sequence
  Description of Artificial Sequence: Synthetic oligonucleotide
  Target: LAMA2; (+) strand; PAM type: YTN; PAM sequence: CTC
cttgcactagaaatagttat

SEQ ID NO: 410603 - DNA, 20 bp, Artificial Sequence
  Description of Artificial Sequence: Synthetic oligonucleotide
  Target: LAMA2; (+) strand; PAM type: YTN; PAM sequence: CTT
gcactagaaatagttattca

SEQ ID NO: 410604 - DNA, 20 bp, Artificial Sequence
  Description of Artificial Sequence: Synthetic oligonucleotide
  Target: LAMA2; (+) strand; PAM type: YTN; PAM sequence: TTG
cactagaaatagttattcaa

SEQ ID NO: 410605 - DNA, 20 bp, Artificial Sequence
  Description of Artificial Sequence: Synthetic oligonucleotide
  Target: LAMA2; (+) strand; PAM type: YTN; PAM sequence: CTA
gaaatagttattcaatgaga

SEQ ID NO: 410606 - DNA, 20 bp, Artificial Sequence
  Description of Artificial Sequence: Synthetic oligonucleotide
  Target: LAMA2; (+) strand; PAM type: YTN; PAM sequence: TTA
ttcaatgagaggccagataa

SEQ ID NO: 410607 - DNA, 20 bp, Artificial Sequence
  Description of Artificial Sequence: Synthetic oligonucleotide
  Target: LAMA2; (+) strand; PAM type: YTN; PAM sequence: TTC
aatgagaggccagataacca

SEQ ID NO: 410608 - DNA, 20 bp, Artificial Sequence
  Description of Artificial Sequence: Synthetic oligonucleotide
  Target: LAMA2; (+) strand; PAM type: YTN; PAM sequence: TTC
aagaaaactggttatttact

SEQ ID NO: 410609 - DNA, 20 bp, Artificial Sequence
  Description of Artificial Sequence: Synthetic oligonucleotide
  Target: LAMA2; (+) strand; PAM type: YTN; PAM sequence: CTG
gttatttactccaagcatcc

SEQ ID NO: 410610 - DNA, 20 bp, Artificial Sequence
  Description of Artificial Sequence: Synthetic oligonucleotide
  Target: LAMA2; (+) strand; PAM type: YTN; PAM sequence: TTA
tttactccaagcatcctttc

SEQ ID NO: 410611 - DNA, 20 bp, Artificial Sequence
  Description of Artificial Sequence: Synthetic oligonucleotide
  Target: LAMA2; (+) strand; PAM type: YTN; PAM sequence: TTT
actccaagcatcctttcatc

SEQ ID NO: 410612 - DNA, 20 bp, Artificial Sequence
  Description of Artificial Sequence: Synthetic oligonucleotide
  Target: LAMA2; (+) strand; PAM type: YTN; PAM sequence: TTA
ctccaagcatcctttcatcc

SEQ ID NO: 410613 - DNA, 20 bp, Artificial Sequence
  Description of Artificial Sequence: Synthetic oligonucleotide
  Target: LAMA2; (+) strand; PAM type: YTN; PAM sequence: CTC
caagcatcctttcatccttt

SEQ ID NO: 410614 - DNA, 20 bp, Artificial Sequence
  Description of Artificial Sequence: Synthetic oligonucleotide
  Target: LAMA2; (+) strand; PAM type: YTN; PAM sequence: CTT
tcatcctttgtaaaatagag

SEQ ID NO: 410615 - DNA, 20 bp, Artificial Sequence
  Description of Artificial Sequence: Synthetic oligonucleotide
  Target: LAMA2; (+) strand; PAM type: YTN; PAM sequence: TTT
catcctttgtaaaatagaga

SEQ ID NO: 410616 - DNA, 20 bp, Artificial Sequence
  Description of Artificial Sequence: Synthetic oligonucleotide
  Target: LAMA2; (+) strand; PAM type: YTN; PAM sequence: TTC
atcctttgtaaaatagagat

SEQ ID NO: 410617 - DNA, 20 bp, Artificial Sequence
  Description of Artificial Sequence: Synthetic oligonucleotide
  Target: LAMA2; (+) strand; PAM type: YTN; PAM sequence: CTT
tgtaaaatagagatatttca

SEQ ID NO: 410618 - DNA, 20 bp, Artificial Sequence
  Description of Artificial Sequence: Synthetic oligonucleotide
  Target: LAMA2; (+) strand; PAM type: YTN; PAM sequence: TTT
gtaaaatagagatatttcat

SEQ ID NO: 410619 - DNA, 20 bp, Artificial Sequence
  Description of Artificial Sequence: Synthetic oligonucleotide
  Target: LAMA2; (+) strand; PAM type: YTN; PAM sequence: TTG
taaaatagagatatttcatc

SEQ ID NO: 410620 - DNA, 20 bp, Artificial Sequence
  Description of Artificial Sequence: Synthetic oligonucleotide
  Target: LAMA2; (+) strand; PAM type: YTN; PAM sequence: TTT
catctatcttgcctacaaca

SEQ ID NO: 410621 - DNA, 20 bp, Artificial Sequence
  Description of Artificial Sequence: Synthetic oligonucleotide
  Target: LAMA2; (+) strand; PAM type: YTN; PAM sequence: TTC
atctatcttgcctacaacat

SEQ ID NO: 410622 - DNA, 20 bp, Artificial Sequence
  Description of Artificial Sequence: Synthetic oligonucleotide
  Target: LAMA2; (+) strand; PAM type: YTN; PAM sequence: CTA
tcttgcctacaacatagagt

SEQ ID NO: 410623 - DNA, 20 bp, Artificial Sequence
  Description of Artificial Sequence: Synthetic oligonucleotide
  Target: LAMA2; (+) strand; PAM type: YTN; PAM sequence: CTT
gcctacaacatagagttatg

SEQ ID NO: 410624 - DNA, 20 bp, Artificial Sequence
  Description of Artificial Sequence: Synthetic oligonucleotide
  Target: LAMA2; (+) strand; PAM type: YTN; PAM sequence: TTG
cctacaacatagagttatga

SEQ ID NO: 410625 - DNA, 20 bp, Artificial Sequence
  Description of Artificial Sequence: Synthetic oligonucleotide
  Target: LAMA2; (+) strand; PAM type: YTN; PAM sequence: CTA
caacatagagttatgaaaaa

SEQ ID NO: 410626 - DNA, 20 bp, Artificial Sequence
  Description of Artificial Sequence: Synthetic oligonucleotide
  Target: LAMA2; (+) strand; PAM type: YTN; PAM sequence: TTA
tgaaaaatcaaatgggataa

SEQ ID NO: 410627 - DNA, 20 bp, Artificial Sequence
  Description of Artificial Sequence: Synthetic oligonucleotide
  Target: LAMA2; (+) strand; PAM type: YTN; PAM sequence: TTA
tctgaaaactggaaaaagca

SEQ ID NO: 410628 - DNA, 20 bp, Artificial Sequence
  Description of Artificial Sequence: Synthetic oligonucleotide
  Target: LAMA2; (+) strand; PAM type: YTN; PAM sequence: CTG
aaaactggaaaaagcatacc

SEQ ID NO: 410629 - DNA, 20 bp, Artificial Sequence
  Description of Artificial Sequence: Synthetic oligonucleotide
  Target: LAMA2; (+) strand; PAM type: YTN; PAM sequence: CTG
gaaaaagcatacccacatag

SEQ ID NO: 410630 - DNA, 20 bp, Artificial Sequence
  Description of Artificial Sequence: Synthetic oligonucleotide
  Target: LAMA2; (+) strand; PAM type: YTN; PAM sequence: CTC
tgaggaatccctgcatttag

SEQ ID NO: 410631 - DNA, 20 bp, Artificial Sequence
  Description of Artificial Sequence: Synthetic oligonucleotide
  Target: LAMA2; (+) strand; PAM type: YTN; PAM sequence: CTG
aggaatccctgcatttagtg

SEQ ID NO: 410632 - DNA, 20 bp, Artificial Sequence
  Description of Artificial Sequence: Synthetic oligonucleotide
  Target: LAMA2; (+) strand; PAM type: YTN; PAM sequence: CTG
catttagtgaataactacta

SEQ ID NO: 410633 - DNA, 20 bp, Artificial Sequence
  Description of Artificial Sequence: Synthetic oligonucleotide
  Target: LAMA2; (+) strand; PAM type: YTN; PAM sequence: TTT
agtgaataactactatgtgt

SEQ ID NO: 410634 - DNA, 20 bp, Artificial Sequence
  Description of Artificial Sequence: Synthetic oligonucleotide
  Target: LAMA2; (+) strand; PAM type: YTN; PAM sequence: TTA
gtgaataactactatgtgtc

SEQ ID NO: 410635 - DNA, 20 bp, Artificial Sequence
  Description of Artificial Sequence: Synthetic oligonucleotide
  Target: LAMA2; (+) strand; PAM type: YTN; PAM sequence: CTA
ctatgtgtccagtactctgc

SEQ ID NO: 410636 - DNA, 20 bp, Artificial Sequence
  Description of Artificial Sequence: Synthetic oligonucleotide
  Target: LAMA2; (+) strand; PAM type: YTN; PAM sequence: CTA
tgtgtccagtactctgccag

SEQ ID NO: 410637 - DNA, 20 bp, Artificial Sequence
  Description of Artificial Sequence: Synthetic oligonucleotide
  Target: LAMA2; (+) strand; PAM type: YTN; PAM sequence: CTC
tgccaggcatttcatatctg

SEQ ID NO: 410638 - DNA, 20 bp, Artificial Sequence
  Description of Artificial Sequence: Synthetic oligonucleotide
  Target: LAMA2; (+) strand; PAM type: YTN; PAM sequence: CTG
ccaggcatttcatatctgtt

SEQ ID NO: 410639 - DNA, 20 bp, Artificial Sequence
  Description of Artificial Sequence: Synthetic oligonucleotide
  Target: LAMA2; (+) strand; PAM type: YTN; PAM sequence: TTT
catatctgttatttcatttt

SEQ ID NO: 410640 - DNA, 20 bp, Artificial Sequence
  Description of Artificial Sequence: Synthetic oligonucleotide
  Target: LAMA2; (+) strand; PAM type: YTN; PAM sequence: TTC
atatctgttatttcatttta

SEQ ID NO: 410641 - DNA, 20 bp, Artificial Sequence
  Description of Artificial Sequence: Synthetic oligonucleotide
  Target: LAMA2; (+) strand; PAM type: YTN; PAM sequence: CTG
ttatttcattttattcccac

SEQ ID NO: 410642 - DNA, 20 bp, Artificial Sequence
  Description of Artificial Sequence: Synthetic oligonucleotide
  Target: LAMA2; (+) strand; PAM type: YTN; PAM sequence: TTA
tttcattttattcccaccct

SEQ ID NO: 410643 - DNA, 20 bp, Artificial Sequence
  Description of Artificial Sequence: Synthetic oligonucleotide
  Target: LAMA2; (+) strand; PAM type: YTN; PAM sequence: TTT
cattttattcccaccctatt

SEQ ID NO: 410644 - DNA, 20 bp, Artificial Sequence
  Description of Artificial Sequence: Synthetic oligonucleotide
  Target: LAMA2; (+) strand; PAM type: YTN; PAM sequence: TTC
attttattcccaccctattg

SEQ ID NO: 410645 - DNA, 20 bp, Artificial Sequence
  Description of Artificial Sequence: Synthetic oligonucleotide
  Target: LAMA2; (+) strand; PAM type: YTN; PAM sequence: TTT
tattcccaccctattgtttt

SEQ ID NO: 410646 - DNA, 20 bp, Artificial Sequence
  Description of Artificial Sequence: Synthetic oligonucleotide
  Target: LAMA2; (+) strand; PAM type: YTN; PAM sequence: TTT
attcccaccctattgtttta

SEQ ID NO: 410647 - DNA, 20 bp, Artificial Sequence
  Description of Artificial Sequence: Synthetic oligonucleotide
  Target: LAMA2; (+) strand; PAM type: YTN; PAM sequence: TTA
ttcccaccctattgttttat

SEQ ID NO: 410648 - DNA, 20 bp, Artificial Sequence
  Description of Artificial Sequence: Synthetic oligonucleotide
  Target: LAMA2; (+) strand; PAM type: YTN; PAM sequence: TTC
ccaccctattgttttattta

SEQ ID NO: 410649 - DNA, 20 bp, Artificial Sequence
  Description of Artificial Sequence: Synthetic oligonucleotide
  Target: LAMA2; (+) strand; PAM type: YTN; PAM sequence: CTA
ttgttttatttacatttatt

SEQ ID NO: 410650 - DNA, 20 bp, Artificial Sequence
  Description of Artificial Sequence: Synthetic oligonucleotide
  Target: LAMA2; (+) strand; PAM type: YTN; PAM sequence: TTG
ttttatttacatttatttat

SEQ ID NO: 410651 - DNA, 20 bp, Artificial Sequence
  Description of Artificial Sequence: Synthetic oligonucleotide
  Target: LAMA2; (+) strand; PAM type: YTN; PAM sequence: TTT
tatttacatttatttatatt

SEQ ID NO: 410652 - DNA, 20 bp, Artificial Sequence
  Description of Artificial Sequence: Synthetic oligonucleotide
  Target: LAMA2; (+) strand; PAM type: YTN; PAM sequence: TTT
atttacatttatttatattg

SEQ ID NO: 410653 - DNA, 20 bp, Artificial Sequence
  Description of Artificial Sequence: Synthetic oligonucleotide
  Target: LAMA2; (+) strand; PAM type: YTN; PAM sequence: TTA
tttacatttatttatattgc

SEQ ID NO: 410654 - DNA, 20 bp, Artificial Sequence
  Description of Artificial Sequence: Synthetic oligonucleotide
  Target: LAMA2; (+) strand; PAM type: YTN; PAM sequence: TTT
acatttatttatattgccag

SEQ ID NO: 410655 - DNA, 20 bp, Artificial Sequence
  Description of Artificial Sequence: Synthetic oligonucleotide
  Target: LAMA2; (+) strand; PAM type: YTN; PAM sequence: TTA
catttatttatattgccaga

SEQ ID NO: 410656 - DNA, 20 bp, Artificial Sequence
  Description of Artificial Sequence: Synthetic oligonucleotide
  Target: LAMA2; (+) strand; PAM type: YTN; PAM sequence: TTT
atttatattgccagaagtat

SEQ ID NO: 410657 - DNA, 20 bp, Artificial Sequence
  Description of Artificial Sequence: Synthetic oligonucleotide
  Target: LAMA2; (+) strand; PAM type: YTN; PAM sequence: TTA
tttatattgccagaagtatt

SEQ ID NO: 410658 - DNA, 20 bp, Artificial Sequence
  Description of Artificial Sequence: Synthetic oligonucleotide
  Target: LAMA2; (+) strand; PAM type: YTN; PAM sequence: TTT
atattgccagaagtattata

SEQ ID NO: 410659 - DNA, 20 bp, Artificial Sequence
  Description of Artificial Sequence: Synthetic oligonucleotide
  Target: LAMA2; (+) strand; PAM type: YTN; PAM sequence: TTA
tattgccagaagtattatat

SEQ ID NO: 410660 - DNA, 20 bp, Artificial Sequence
  Description of Artificial Sequence: Synthetic oligonucleotide
  Target: LAMA2; (+) strand; PAM type: YTN; PAM sequence: TTG
ccagaagtattatatttcac

SEQ ID NO: 410661 - DNA, 20 bp, Artificial Sequence
  Description of Artificial Sequence: Synthetic oligonucleotide
  Target: LAMA2; (+) strand; PAM type: YTN; PAM sequence: TTA
tatttcacaaaggaaaatac

SEQ ID NO: 410662 - DNA, 20 bp, Artificial Sequence
  Description of Artificial Sequence: Synthetic oligonucleotide
  Target: LAMA2; (+) strand; PAM type: YTN; PAM sequence: TTT
cacaaaggaaaatacctaag

SEQ ID NO: 410663 - DNA, 20 bp, Artificial Sequence
  Description of Artificial Sequence: Synthetic oligonucleotide
  Target: LAMA2; (+) strand; PAM type: YTN; PAM sequence: TTC
acaaaggaaaatacctaaga

SEQ ID NO: 410664 - DNA, 20 bp, Artificial Sequence
  Description of Artificial Sequence: Synthetic oligonucleotide
  Target: LAMA2; (+) strand; PAM type: YTN; PAM sequence: CTA
agatcacacagctagcaagt

SEQ ID NO: 410665 - DNA, 20 bp, Artificial Sequence
  Description of Artificial Sequence: Synthetic oligonucleotide
  Target: LAMA2; (+) strand; PAM type: YTN; PAM sequence: CTA
gcaagtggaaagctgtcagt

SEQ ID NO: 410666 - DNA, 20 bp, Artificial Sequence
  Description of Artificial Sequence: Synthetic oligonucleotide
  Target: LAMA2; (+) strand; PAM type: YTN; PAM sequence: CTG
tcagtcatggggggttagtt

SEQ ID NO: 410667 - DNA, 20 bp, Artificial Sequence
  Description of Artificial Sequence: Synthetic oligonucleotide
  Target: LAMA2; (+) strand; PAM type: YTN; PAM sequence: TTA
gttccaggagttgatttcat

SEQ ID NO: 410668 - DNA, 20 bp, Artificial Sequence
  Description of Artificial Sequence: Synthetic oligonucleotide
  Target: LAMA2; (+) strand; PAM type: YTN; PAM sequence: TTC
caggagttgatttcatccta

SEQ ID NO: 410669 - DNA, 20 bp, Artificial Sequence
  Description of Artificial Sequence: Synthetic oligonucleotide
  Target: LAMA2; (+) strand; PAM type: YTN; PAM sequence: TTG
atttcatcctaaagcattcc

SEQ ID NO: 410670 - DNA, 20 bp, Artificial Sequence
  Description of Artificial Sequence: Synthetic oligonucleotide
  Target: LAMA2; (+) strand; PAM type: YTN; PAM sequence: TTT
catcctaaagcattcctgag

SEQ ID NO: 410671 - DNA, 20 bp, Artificial Sequence
  Description of Artificial Sequence: Synthetic oligonucleotide
  Target: LAMA2; (+) strand; PAM type: YTN; PAM sequence: TTC
atcctaaagcattcctgaga

SEQ ID NO: 410672 - DNA, 20 bp, Artificial Sequence
  Description of Artificial Sequence: Synthetic oligonucleotide
  Target: LAMA2; (+) strand; PAM type: YTN; PAM sequence: CTA
aagcattcctgagatctgcc

SEQ ID NO: 410673 - DNA, 20 bp, Artificial Sequence
  Description of Artificial Sequence: Synthetic oligonucleotide
  Target: LAMA2; (+) strand; PAM type: YTN; PAM sequence: TTC
ctgagatctgccacatggat

SEQ ID NO: 410674 - DNA, 20 bp, Artificial Sequence
  Description of Artificial Sequence: Synthetic oligonucleotide
  Target: LAMA2; (+) strand; PAM type: YTN; PAM sequence: CTG
agatctgccacatggatttc

SEQ ID NO: 410675 - DNA, 20 bp, Artificial Sequence
  Description of Artificial Sequence: Synthetic oligonucleotide
  Target: LAMA2; (+) strand; PAM type: YTN; PAM sequence: CTG
ccacatggatttcagaatgt

SEQ ID NO: 410676 - DNA, 20 bp, Artificial Sequence
  Description of Artificial Sequence: Synthetic oligonucleotide
  Target: LAMA2; (+) strand; PAM type: YTN; PAM sequence: TTT
cagaatgtttcctcagctct

SEQ ID NO: 410677 - DNA, 20 bp, Artificial Sequence
  Description of Artificial Sequence: Synthetic oligonucleotide
  Target: LAMA2; (+) strand; PAM type: YTN; PAM sequence: TTC
agaatgtttcctcagctctt

SEQ ID NO: 410678 - DNA, 20 bp, Artificial Sequence
  Description of Artificial Sequence: Synthetic oligonucleotide
  Target: LAMA2; (+) strand; PAM type: YTN; PAM sequence: TTT
cctcagctctttcataattc

SEQ ID NO: 410679 - DNA, 20 bp, Artificial Sequence
  Description of Artificial Sequence: Synthetic oligonucleotide
  Target: LAMA2; (+) strand; PAM type: YTN; PAM sequence: TTC
ctcagctctttcataattca

SEQ ID NO: 410680 - DNA, 20 bp, Artificial Sequence
  Description of Artificial Sequence: Synthetic oligonucleotide
  Target: LAMA2; (+) strand; PAM type: YTN; PAM sequence: CTC
agctctttcataattcagcc

SEQ ID NO: 410681 - DNA, 20 bp, Artificial Sequence
  Description of Artificial Sequence: Synthetic oligonucleotide
  Target: LAMA2; (+) strand; PAM type: YTN; PAM sequence: CTC
tttcataattcagccacagg

SEQ ID NO: 410682 - DNA, 20 bp, Artificial Sequence
  Description of Artificial Sequence: Synthetic oligonucleotide
  Target: LAMA2; (+) strand; PAM type: YTN; PAM sequence: CTT
tcataattcagccacaggtt

SEQ ID NO: 410683 - DNA, 20 bp, Artificial Sequence
  Description of Artificial Sequence: Synthetic oligonucleotide
  Target: LAMA2; (+) strand; PAM type: YTN; PAM sequence: TTT
cataattcagccacaggtta

SEQ ID NO: 410684 - DNA, 20 bp, Artificial Sequence
  Description of Artificial Sequence: Synthetic oligonucleotide
  Target: LAMA2; (+) strand; PAM type: YTN; PAM sequence: TTC
ataattcagccacaggttag

SEQ ID NO: 410685 - DNA, 20 bp, Artificial Sequence
  Description of Artificial Sequence: Synthetic oligonucleotide
  Target: LAMA2; (+) strand; PAM type: YTN; PAM sequence: TTC
agccacaggttagatctttg

SEQ ID NO: 410686 - DNA, 20 bp, Artificial Sequence
  Description of Artificial Sequence: Synthetic oligonucleotide
  Target: LAMA2; (+) strand; PAM type: YTN; PAM sequence: TTA
gatctttgcttagcaaaggt

SEQ ID NO: 410687 - DNA, 20 bp, Artificial Sequence
  Description of Artificial Sequence: Synthetic oligonucleotide
  Target: LAMA2; (+) strand; PAM type: YTN; PAM sequence: CTT
tgcttagcaaaggtaaggtt

SEQ ID NO: 410688 - DNA, 20 bp, Artificial Sequence
  Description of Artificial Sequence: Synthetic oligonucleotide
  Target: LAMA2; (+) strand; PAM type: YTN; PAM sequence: TTT
gcttagcaaaggtaaggtta

SEQ ID NO: 410689 - DNA, 20 bp, Artificial Sequence
  Description of Artificial Sequence: Synthetic oligonucleotide
  Target: LAMA2; (+) strand; PAM type: YTN; PAM sequence: TTG
cttagcaaaggtaaggttaa

SEQ ID NO: 410690 - DNA, 20 bp, Artificial Sequence
  Description of Artificial Sequence: Synthetic oligonucleotide
  Target: LAMA2; (+) strand; PAM type: YTN; PAM sequence: CTT
agcaaaggtaaggttaatga

SEQ ID NO: 410691 - DNA, 20 bp, Artificial Sequence
  Description of Artificial Sequence: Synthetic oligonucleotide
  Target: LAMA2; (+) strand; PAM type: YTN; PAM sequence: TTA
gcaaaggtaaggttaatgat

SEQ ID NO: 410692 - DNA, 20 bp, Artificial Sequence
  Description of Artificial Sequence: Synthetic oligonucleotide
  Target: LAMA2; (+) strand; PAM type: YTN; PAM sequence: TTA
atgatcctcctcttcaccct

SEQ ID NO: 410693 - DNA, 20 bp, Artificial Sequence
  Description of Artificial Sequence: Synthetic oligonucleotide
  Target: LAMA2; (+) strand; PAM type: YTN; PAM sequence: CTC
ctcttcaccctcatatacct

SEQ ID NO: 410694 - DNA, 20 bp, Artificial Sequence
  Description of Artificial Sequence: Synthetic oligonucleotide
  Target: LAMA2; (+) strand; PAM type: YTN; PAM sequence: CTC
ttcaccctcatatacctgaa

SEQ ID NO: 410695 - DNA, 20 bp, Artificial Sequence
  Description of Artificial Sequence: Synthetic oligonucleotide
  Target: LAMA2; (+) strand; PAM type: YTN; PAM sequence: CTT
caccctcatatacctgaaaa

SEQ ID NO: 410696 - DNA, 20 bp, Artificial Sequence
  Description of Artificial Sequence: Synthetic oligonucleotide
  Target: LAMA2; (+) strand; PAM type: YTN; PAM sequence: TTC
accctcatatacctgaaaat

SEQ ID NO: 410697 - DNA, 20 bp, Artificial Sequence
  Description of Artificial Sequence: Synthetic oligonucleotide
  Target: LAMA2; (+) strand; PAM type: YTN; PAM sequence: CTC
atatacctgaaaatcatgtg

SEQ ID NO: 410698 - DNA, 20 bp, Artificial Sequence
  Description of Artificial Sequence: Synthetic oligonucleotide
  Target: LAMA2; (+) strand; PAM type: YTN; PAM sequence: CTG
aaaatcatgtgtttctcaga

SEQ ID NO: 410699 - DNA, 20 bp, Artificial Sequence
  Description of Artificial Sequence: Synthetic oligonucleotide
  Target: LAMA2; (+) strand; PAM type: YTN; PAM sequence: TTT
ctcagactcataaacatgtt

SEQ ID NO: 410700 - DNA, 20 bp, Artificial Sequence
  Description of Artificial Sequence: Synthetic oligonucleotide
  Target: LAMA2; (+) strand; PAM type: YTN; PAM sequence: TTC
tcagactcataaacatgttt

SEQ ID NO: 410701 - DNA, 20 bp, Artificial Sequence
  Description of Artificial Sequence: Synthetic oligonucleotide
  Target: LAMA2; (+) strand; PAM type: YTN; PAM sequence: CTC
agactcataaacatgttttc

SEQ ID NO: 410702 - DNA, 20 bp, Artificial Sequence
  Description of Artificial Sequence: Synthetic oligonucleotide
  Target: LAMA2; (+) strand; PAM type: YTN; PAM sequence: CTC
ataaacatgttttcagttga

SEQ ID NO: 410703 - DNA, 20 bp, Artificial Sequence
  Description of Artificial Sequence: Synthetic oligonucleotide
  Target: LAMA2; (+) strand; PAM type: YTN; PAM sequence: TTT
tcagttgaagaattagaaaa

SEQ ID NO: 410704 - DNA, 20 bp, Artificial Sequence
  Description of Artificial Sequence: Synthetic oligonucleotide
  Target: LAMA2; (+) strand; PAM type: YTN; PAM sequence: TTT
cagttgaagaattagaaaac

SEQ ID NO: 410705 - DNA, 20 bp, Artificial Sequence
  Description of Artificial Sequence: Synthetic oligonucleotide
  Target: LAMA2; (+) strand; PAM type: YTN; PAM sequence: TTC
agttgaagaattagaaaaca

SEQ ID NO: 410706 - DNA, 20 bp, Artificial Sequence
  Description of Artificial Sequence: Synthetic oligonucleotide
  Target: LAMA2; (+) strand; PAM type: YTN; PAM sequence: TTG
aagaattagaaaacatcatg

SEQ ID NO: 410707 - DNA, 20 bp, Artificial Sequence
  Description of Artificial Sequence: Synthetic oligonucleotide
  Target: LAMA2; (+) strand; PAM type: YTN; PAM sequence: TTA
gaaaacatcatgagttgaat

SEQ ID NO: 410708 - DNA, 20 bp, Artificial Sequence
  Description of Artificial Sequence: Synthetic oligonucleotide
  Target: LAMA2; (+) strand; PAM type: YTN; PAM sequence: TTG
aataaacttttttgaccttg

SEQ ID NO: 410709 - DNA, 20 bp, Artificial Sequence
  Description of Artificial Sequence: Synthetic oligonucleotide
  Target: LAMA2; (+) strand; PAM type: YTN; PAM sequence: CTT
ttttgaccttggatcctaat

SEQ ID NO: 410710 - DNA, 20 bp, Artificial Sequence
  Description of Artificial Sequence: Synthetic oligonucleotide
  Target: LAMA2; (+) strand; PAM type: YTN; PAM sequence: TTT
tttgaccttggatcctaatg

SEQ ID NO: 410711 - DNA, 20 bp, Artificial Sequence
  Description of Artificial Sequence: Synthetic oligonucleotide
  Target: LAMA2; (+) strand; PAM type: YTN; PAM sequence: TTT
ttgaccttggatcctaatgt

SEQ ID NO: 410712 - DNA, 20 bp, Artificial Sequence
  Description of Artificial Sequence: Synthetic oligonucleotide
  Target: LAMA2; (+) strand; PAM type: YTN; PAM sequence: TTT
tgaccttggatcctaatgtc

SEQ ID NO: 410713 - DNA, 20 bp, Artificial Sequence
  Description of Artificial Sequence: Synthetic oligonucleotide
  Target: LAMA2; (+) strand; PAM type: YTN; PAM sequence: TTT
gaccttggatcctaatgtcc

SEQ ID NO: 410714 - DNA, 20 bp, Artificial Sequence
  Description of Artificial Sequence: Synthetic oligonucleotide
  Target: LAMA2; (+) strand; PAM type: YTN; PAM sequence: TTG
accttggatcctaatgtcca

SEQ ID NO: 410715 - DNA, 20 bp, Artificial Sequence
  Description of Artificial Sequence: Synthetic oligonucleotide
  Target: LAMA2; (+) strand; PAM type: YTN; PAM sequence: CTT
ggatcctaatgtccacttat

SEQ ID NO: 410716 - DNA, 20 bp, Artificial Sequence
  Description of Artificial Sequence: Synthetic oligonucleotide
  Target: LAMA2; (+) strand; PAM type: YTN; PAM sequence: TTG
gatcctaatgtccacttata

SEQ ID NO: 410717 - DNA, 20 bp, Artificial Sequence
  Description of Artificial Sequence: Synthetic oligonucleotide
  Target: LAMA2; (+) strand; PAM type: YTN; PAM sequence: CTA
atgtccacttataaaaatgt

SEQ ID NO: 410718 - DNA, 20 bp, Artificial Sequence
  Description of Artificial Sequence: Synthetic oligonucleotide
  Target: LAMA2; (+) strand; PAM type: YTN; PAM sequence: CTT
ataaaaatgtttctaggaga

SEQ ID NO: 410719 - DNA, 20 bp, Artificial Sequence
  Description of Artificial Sequence: Synthetic oligonucleotide
  Target: LAMA2; (+) strand; PAM type: YTN; PAM sequence: TTA
taaaaatgtttctaggagaa

SEQ ID NO: 410720 - DNA, 20 bp, Artificial Sequence
  Description of Artificial Sequence: Synthetic oligonucleotide
  Target: LAMA2; (+) strand; PAM type: YTN; PAM sequence: TTT
ctaggagaaaacagcctaat

SEQ ID NO: 410721 - DNA, 20 bp, Artificial Sequence
  Description of Artificial Sequence: Synthetic oligonucleotide
  Target: LAMA2; (+) strand; PAM type: YTN; PAM sequence: TTC
taggagaaaacagcctaatt

SEQ ID NO: 410722 - DNA, 20 bp, Artificial Sequence
  Description of Artificial Sequence: Synthetic oligonucleotide
  Target: LAMA2; (+) strand; PAM type: YTN; PAM sequence: CTA
ggagaaaacagcctaatttc

SEQ ID NO: 410723 - DNA, 20 bp, Artificial Sequence
  Description of Artificial Sequence: Synthetic oligonucleotide
  Target: LAMA2; (+) strand; PAM type: YTN; PAM sequence: CTA
atttctaaatgactaactta

SEQ ID NO: 410724 - DNA, 20 bp, Artificial Sequence
  Description of Artificial Sequence: Synthetic oligonucleotide
  Target: LAMA2; (+) strand; PAM type: YTN; PAM sequence: TTT
ctaaatgactaacttaaaat

SEQ ID NO: 410725 - DNA, 20 bp, Artificial Sequence
  Description of Artificial Sequence: Synthetic oligonucleotide
  Target: LAMA2; (+) strand; PAM type: YTN; PAM sequence: TTC
taaatgactaacttaaaatt

SEQ ID NO: 410726 - DNA, 20 bp, Artificial Sequence
  Description of Artificial Sequence: Synthetic oligonucleotide
  Target: LAMA2; (+) strand; PAM type: YTN; PAM sequence: CTA
aatgactaacttaaaattat

SEQ ID NO: 410727 - DNA, 20 bp, Artificial Sequence
  Description of Artificial Sequence: Synthetic oligonucleotide
  Target: LAMA2; (+) strand; PAM type: YTN; PAM sequence: CTA
acttaaaattataaactaaa

SEQ ID NO: 410728 - DNA, 20 bp, Artificial Sequence
  Description of Artificial Sequence: Synthetic oligonucleotide
  Target: LAMA2; (+) strand; PAM type: YTN; PAM sequence: CTT
aaaattataaactaaaattg

SEQ ID NO: 410729 - DNA, 20 bp, Artificial Sequence
  Description of Artificial Sequence: Synthetic oligonucleotide
  Target: LAMA2; (+) strand; PAM type: YTN; PAM sequence: TTA
aaattataaactaaaattgg

SEQ ID NO: 410730 - DNA, 20 bp, Artificial Sequence
  Description of Artificial Sequence: Synthetic oligonucleotide
  Target: LAMA2; (+) strand; PAM type: YTN; PAM sequence: TTA
taaactaaaattggcaagag

SEQ ID NO: 410731 - DNA, 20 bp, Artificial Sequence
  Description of Artificial Sequence: Synthetic oligonucleotide
  Target: LAMA2; (+) strand; PAM type: YTN; PAM sequence: CTA
aaattggcaagagccctaaa

SEQ ID NO: 410732 - DNA, 20 bp, Artificial Sequence
  Description of Artificial Sequence: Synthetic oligonucleotide
  Target: LAMA2; (+) strand; PAM type: YTN; PAM sequence: TTG
gcaagagccctaaagatcat

SEQ ID NO: 410733 - DNA, 20 bp, Artificial Sequence
  Description of Artificial Sequence: Synthetic oligonucleotide
  Target: LAMA2; (+) strand; PAM type: YTN; PAM sequence: CTA
aagatcatctggtccaatca

SEQ ID NO: 410734 - DNA, 20 bp, Artificial Sequence
  Description of Artificial Sequence: Synthetic oligonucleotide
  Target: LAMA2; (+) strand; PAM type: YTN; PAM sequence: CTG
gtccaatcaccatcttaatg

SEQ ID NO: 410735 - DNA, 20 bp, Artificial Sequence
  Description of Artificial Sequence: Synthetic oligonucleotide
  Target: LAMA2; (+) strand; PAM type: YTN; PAM sequence: CTT
aatgcatgggttccttttac

SEQ ID NO: 410736 - DNA, 20 bp, Artificial Sequence
  Description of Artificial Sequence: Synthetic oligonucleotide
  Target: LAMA2; (+) strand; PAM type: YTN; PAM sequence: TTA
atgcatgggttccttttaca

SEQ ID NO: 410737 - DNA, 20 bp, Artificial Sequence
  Description of Artificial Sequence: Synthetic oligonucleotide
  Target: LAMA2; (+) strand; PAM type: YTN; PAM sequence: TTC
cttttacatgatacttacag

SEQ ID NO: 410738 - DNA, 20 bp, Artificial Sequence
  Description of Artificial Sequence: Synthetic oligonucleotide
  Target: LAMA2; (+) strand; PAM type: YTN; PAM sequence: CTT
ttacatgatacttacagcct

SEQ ID NO: 410739 - DNA, 20 bp, Artificial Sequence
  Description of Artificial Sequence: Synthetic oligonucleotide
  Target: LAMA2; (+) strand; PAM type: YTN; PAM sequence: TTT
tacatgatacttacagcctt

SEQ ID NO: 410740 - DNA, 20 bp, Artificial Sequence
  Description of Artificial Sequence: Synthetic oligonucleotide
  Target: LAMA2; (+) strand; PAM type: YTN; PAM sequence: TTT
acatgatacttacagccttt

SEQ ID NO: 410741 - DNA, 20 bp, Artificial Sequence
  Description of Artificial Sequence: Synthetic oligonucleotide
  Target: LAMA2; (+) strand; PAM type: YTN; PAM sequence: TTA
catgatacttacagcctttg

SEQ ID NO: 410742 - DNA, 20 bp, Artificial Sequence
  Description of Artificial Sequence: Synthetic oligonucleotide
  Target: LAMA2; (+) strand; PAM type: YTN; PAM sequence: CTT
acagcctttgcttgaacatt

SEQ ID NO: 410743 - DNA, 20 bp, Artificial Sequence
  Description of Artificial Sequence: Synthetic oligonucleotide
  Target: LAMA2; (+) strand; PAM type: YTN; PAM sequence: TTA
cagcctttgcttgaacattt

SEQ ID NO: 410744 - DNA, 20 bp, Artificial Sequence
  Description of Artificial Sequence: Synthetic oligonucleotide
  Target: LAMA2; (+) strand; PAM type: YTN; PAM sequence: CTT
tgcttgaacatttcattgac

SEQ ID NO: 410745 - DNA, 20 bp, Artificial Sequence
  Description of Artificial Sequence: Synthetic oligonucleotide
  Target: LAMA2; (+) strand; PAM type: YTN; PAM sequence: TTT
gcttgaacatttcattgaca

SEQ ID NO: 410746 - DNA, 20 bp, Artificial Sequence
  Description of Artificial Sequence: Synthetic oligonucleotide
  Target: LAMA2; (+) strand; PAM type: YTN; PAM sequence: TTG
cttgaacatttcattgacaa

SEQ ID NO: 410747 - DNA, 20 bp, Artificial Sequence
  Description of Artificial Sequence: Synthetic oligonucleotide
  Target: LAMA2; (+) strand; PAM type: YTN; PAM sequence: CTT
gaacatttcattgacaagat

SEQ ID NO: 410748 - DNA, 20 bp, Artificial Sequence
  Description of Artificial Sequence: Synthetic oligonucleotide
  Target: LAMA2; (+) strand; PAM type: YTN; PAM sequence: TTG
aacatttcattgacaagatt

SEQ ID NO: 410749 - DNA, 20 bp, Artificial Sequence
  Description of Artificial Sequence: Synthetic oligonucleotide
  Target: LAMA2; (+) strand; PAM type: YTN; PAM sequence: TTT
cattgacaagattttccagt

SEQ ID NO: 410750 - DNA, 20 bp, Artificial Sequence
  Description of Artificial Sequence: Synthetic oligonucleotide
  Target: LAMA2; (+) strand; PAM type: YTN; PAM sequence: TTC
attgacaagattttccagtg

SEQ ID NO: 410751 - DNA, 20 bp, Artificial Sequence
  Description of Artificial Sequence: Synthetic oligonucleotide
  Target: LAMA2; (+) strand; PAM type: YTN; PAM sequence: TTG
acaagattttccagtgttat

SEQ ID NO: 410752 - DNA, 20 bp, Artificial Sequence
  Description of Artificial Sequence: Synthetic oligonucleotide
  Target: LAMA2; (+) strand; PAM type: YTN; PAM sequence: TTT
tccagtgttatgacaaggca

SEQ ID NO: 410753 - DNA, 20 bp, Artificial Sequence
  Description of Artificial Sequence: Synthetic oligonucleotide
  Target: LAMA2; (+) strand; PAM type: YTN; PAM sequence: TTT
ccagtgttatgacaaggcag

SEQ ID NO: 410754 - DNA, 20 bp, Artificial Sequence
  Description of Artificial Sequence: Synthetic oligonucleotide
  Target: LAMA2; (+) strand; PAM type: YTN; PAM sequence: TTC
cagtgttatgacaaggcagg

SEQ ID NO: 410755 - DNA, 20 bp, Artificial Sequence
  Description of Artificial Sequence: Synthetic oligonucleotide
  Target: LAMA2; (+) strand; PAM type: YTN; PAM sequence: TTA
tgacaaggcaggctcgagtt

SEQ ID NO: 410756 - DNA, 20 bp, Artificial Sequence
  Description of Artificial Sequence: Synthetic oligonucleotide
  Target: LAMA2; (+) strand; PAM type: YTN; PAM sequence: CTC
gagttgttagaaagccatcg

SEQ ID NO: 410757 - DNA, 20 bp, Artificial Sequence
  Description of Artificial Sequence: Synthetic oligonucleotide
  Target: LAMA2; (+) strand; PAM type: YTN; PAM sequence: TTG
ttagaaagccatcggttaca

SEQ ID NO: 410758 - DNA, 20 bp, Artificial Sequence
  Description of Artificial Sequence: Synthetic oligonucleotide
  Target: LAMA2; (+) strand; PAM type: YTN; PAM sequence: TTA
gaaagccatcggttacatta

SEQ ID NO: 410759 - DNA, 20 bp, Artificial Sequence
  Description of Artificial Sequence: Synthetic oligonucleotide
  Target: LAMA2; (+) strand; PAM type: YTN; PAM sequence: TTA
cattaagttaaaactgagtc

SEQ ID NO: 410760 - DNA, 20 bp, Artificial Sequence
  Description of Artificial Sequence: Synthetic oligonucleotide
  Target: LAMA2; (+) strand; PAM type: YTN; PAM sequence: TTA
agttaaaactgagtccctaa

SEQ ID NO: 410761 - DNA, 20 bp, Artificial Sequence
  Description of Artificial Sequence: Synthetic oligonucleotide
  Target: LAMA2; (+) strand; PAM type: YTN; PAM sequence: TTA
aaactgagtccctaaaactt

SEQ ID NO: 410762 - DNA, 20 bp, Artificial Sequence
  Description of Artificial Sequence: Synthetic oligonucleotide
  Target: LAMA2; (+) strand; PAM type: YTN; PAM sequence: CTG
agtccctaaaacttctatgt

SEQ ID NO: 410763 - DNA, 20 bp, Artificial Sequence
  Description of Artificial Sequence: Synthetic oligonucleotide
  Target: LAMA2; (+) strand; PAM type: YTN; PAM sequence: CTA
aaacttctatgtaatgattg

SEQ ID NO: 410764 - DNA, 20 bp, Artificial Sequence
  Description of Artificial Sequence: Synthetic oligonucleotide
  Target: LAMA2; (+) strand; PAM type: YTN; PAM sequence: CTT
ctatgtaatgattgtatttc

SEQ ID NO: 410765 - DNA, 20 bp, Artificial Sequence
  Description of Artificial Sequence: Synthetic oligonucleotide
  Target: LAMA2; (+) strand; PAM type: YTN; PAM sequence: TTC
tatgtaatgattgtatttct

SEQ ID NO: 410766 - DNA, 20 bp, Artificial Sequence
  Description of Artificial Sequence: Synthetic oligonucleotide
  Target: LAMA2; (+) strand; PAM type: YTN; PAM sequence: CTA
tgtaatgattgtatttctat

SEQ ID NO: 410767 - DNA, 20 bp, Artificial Sequence
  Description of Artificial Sequence: Synthetic oligonucleotide
  Target: LAMA2; (+) strand; PAM type: YTN; PAM sequence: TTG
tatttctataggcaaacaca

SEQ ID NO: 410768 - DNA, 20 bp, Artificial Sequence
  Description of Artificial Sequence: Synthetic oligonucleotide
  Target: LAMA2; (+) strand; PAM type: YTN; PAM sequence: TTT
ctataggcaaacacattaca

SEQ ID NO: 410769 - DNA, 20 bp, Artificial Sequence
  Description of Artificial Sequence: Synthetic oligonucleotide
  Target: LAMA2; (+) strand; PAM type: YTN; PAM sequence: TTC
tataggcaaacacattacat

SEQ ID NO: 410770 - DNA, 20 bp, Artificial Sequence
  Description of Artificial Sequence: Synthetic oligonucleotide
  Target: LAMA2; (+) strand; PAM type: YTN; PAM sequence: CTA
taggcaaacacattacattt

SEQ ID NO: 410771 - DNA, 20 bp, Artificial Sequence
  Description of Artificial Sequence: Synthetic oligonucleotide
  Target: LAMA2; (+) strand; PAM type: YTN; PAM sequence: TTA
catttatgtgtcctctgtct

SEQ ID NO: 410772 - DNA, 20 bp, Artificial Sequence
  Description of Artificial Sequence: Synthetic oligonucleotide
  Target: LAMA2; (+) strand; PAM type: YTN; PAM sequence: TTT
atgtgtcctctgtctaacat

SEQ ID NO: 410773 - DNA, 20 bp, Artificial Sequence
  Description of Artificial Sequence: Synthetic oligonucleotide
  Target: LAMA2; (+) strand; PAM type: YTN; PAM sequence: TTA
tgtgtcctctgtctaacatc

SEQ ID NO: 410774 - DNA, 20 bp, Artificial Sequence
  Description of Artificial Sequence: Synthetic oligonucleotide
  Target: LAMA2; (+) strand; PAM type: YTN; PAM sequence: CTC
tgtctaacatcccttcaata

SEQ ID NO: 410775 - DNA, 20 bp, Artificial Sequence
  Description of Artificial Sequence: Synthetic oligonucleotide
  Target: LAMA2; (+) strand; PAM type: YTN; PAM sequence: CTG
tctaacatcccttcaataat

SEQ ID NO: 410776 - DNA, 20 bp, Artificial Sequence
  Description of Artificial Sequence: Synthetic oligonucleotide
  Target: LAMA2; (+) strand; PAM type: YTN; PAM sequence: CTA
acatcccttcaataatttga

SEQ ID NO: 410777 - DNA, 20 bp, Artificial Sequence
  Description of Artificial Sequence: Synthetic oligonucleotide
  Target: LAMA2; (+) strand; PAM type: YTN; PAM sequence: CTT
caataatttgaaaatagcta

SEQ ID NO: 410778 - DNA, 20 bp, Artificial Sequence
  Description of Artificial Sequence: Synthetic oligonucleotide
  Target: LAMA2; (+) strand; PAM type: YTN; PAM sequence: TTC
aataatttgaaaatagctaa

SEQ ID NO: 410779 - DNA, 20 bp, Artificial Sequence
  Description of Artificial Sequence: Synthetic oligonucleotide
  Target: LAMA2; (+) strand; PAM type: YTN; PAM sequence: TTT
gaaaatagctaagtcttctc

SEQ ID NO: 410780 - DNA, 20 bp, Artificial Sequence
  Description of Artificial Sequence: Synthetic oligonucleotide
  Target: LAMA2; (+) strand; PAM type: YTN; PAM sequence: TTG
aaaatagctaagtcttctcc

SEQ ID NO: 410781 - DNA, 20 bp, Artificial Sequence
  Description of Artificial Sequence: Synthetic oligonucleotide
  Target: LAMA2; (+) strand; PAM type: YTN; PAM sequence: CTA
agtcttctccttccctaggc

SEQ ID NO: 410782 - DNA, 20 bp, Artificial Sequence
  Description of Artificial Sequence: Synthetic oligonucleotide
  Target: LAMA2; (+) strand; PAM type: YTN; PAM sequence: CTT
ctccttccctaggctaacca

SEQ ID NO: 410783 - DNA, 20 bp, Artificial Sequence
  Description of Artificial Sequence: Synthetic oligonucleotide
  Target: LAMA2; (+) strand; PAM type: YTN; PAM sequence: TTC
tccttccctaggctaaccat

SEQ ID NO: 410784 - DNA, 20 bp, Artificial Sequence
  Description of Artificial Sequence: Synthetic oligonucleotide
  Target: LAMA2; (+) strand; PAM type: YTN; PAM sequence: CTC
cttccctaggctaaccattt

SEQ ID NO: 410785 - DNA, 20 bp, Artificial Sequence
  Description of Artificial Sequence: Synthetic oligonucleotide
  Target: LAMA2; (+) strand; PAM type: YTN; PAM sequence: CTT
ccctaggctaaccatttccc

SEQ ID NO: 410786 - DNA, 20 bp, Artificial Sequence
  Description of Artificial Sequence: Synthetic oligonucleotide
  Target: LAMA2; (+) strand; PAM type: YTN; PAM sequence: TTC
cctaggctaaccatttccct

SEQ ID NO: 410787 - DNA, 20 bp, Artificial Sequence
  Description of Artificial Sequence: Synthetic oligonucleotide
  Target: LAMA2; (+) strand; PAM type: YTN; PAM sequence: CTA
ggctaaccatttccctagct

SEQ ID NO: 410788 - DNA, 20 bp, Artificial Sequence
  Description of Artificial Sequence: Synthetic oligonucleotide
  Target: LAMA2; (+) strand; PAM type: YTN; PAM sequence: CTA
accatttccctagcttaggt

SEQ ID NO: 410789 - DNA, 20 bp, Artificial Sequence
  Description of Artificial Sequence: Synthetic oligonucleotide
  Target: LAMA2; (+) strand; PAM type: YTN; PAM sequence: TTT
ccctagcttaggtattcttt

SEQ ID NO: 410790 - DNA, 20 bp, Artificial Sequence
  Description of Artificial Sequence: Synthetic oligonucleotide
  Target: LAMA2; (+) strand; PAM type: YTN; PAM sequence: TTC
cctagcttaggtattctttg

SEQ ID NO: 410791 - DNA, 20 bp, Artificial Sequence
  Description of Artificial Sequence: Synthetic oligonucleotide
  Target: LAMA2; (+) strand; PAM type: YTN; PAM sequence: CTA
gcttaggtattctttgtatt

SEQ ID NO: 410792 - DNA, 20 bp, Artificial Sequence
  Description of Artificial Sequence: Synthetic oligonucleotide
  Target: LAMA2; (+) strand; PAM type: YTN; PAM sequence: CTT
aggtattctttgtattatct

SEQ ID NO: 410793 - DNA, 20 bp, Artificial Sequence
  Description of Artificial Sequence: Synthetic oligonucleotide
  Target: LAMA2; (+) strand; PAM type: YTN; PAM sequence: TTA
ggtattctttgtattatctc

SEQ ID NO: 410794 - DNA, 20 bp, Artificial Sequence
  Description of Artificial Sequence: Synthetic oligonucleotide
  Target: LAMA2; (+) strand; PAM type: YTN; PAM sequence: TTC
tttgtattatctcatttcta

SEQ ID NO: 410795 - DNA, 20 bp, Artificial Sequence
  Description of Artificial Sequence: Synthetic oligonucleotide
  Target: LAMA2; (+) strand; PAM type: YTN; PAM sequence: CTT
tgtattatctcatttctaat

SEQ ID NO: 410796 - DNA, 20 bp, Artificial Sequence
  Description of Artificial Sequence: Synthetic oligonucleotide
  Target: LAMA2; (+) strand; PAM type: YTN; PAM sequence: TTT
gtattatctcatttctaatt

SEQ ID NO: 410797 - DNA, 20 bp, Artificial Sequence
  Description of Artificial Sequence: Synthetic oligonucleotide
  Target: LAMA2; (+) strand; PAM type: YTN; PAM sequence: TTG
tattatctcatttctaatta

SEQ ID NO: 410798 - DNA, 20 bp, Artificial Sequence
  Description of Artificial Sequence: Synthetic oligonucleotide
  Target: LAMA2; (+) strand; PAM type: YTN; PAM sequence: TTA
tctcatttctaattactatc

SEQ ID NO: 410799 - DNA, 20 bp, Artificial Sequence
  Description of Artificial Sequence: Synthetic oligonucleotide
  Target: LAMA2; (+) strand; PAM type: YTN; PAM sequence: CTC
atttctaattactatcccct

SEQ ID NO: 410800 - DNA, 20 bp, Artificial Sequence
  Description of Artificial Sequence: Synthetic oligonucleotide
  Target: LAMA2; (+) strand; PAM type: YTN; PAM sequence: TTT
ctaattactatcccctccat

SEQ ID NO: 410801 - DNA, 20 bp, Artificial Sequence
  Description of Artificial Sequence: Synthetic oligonucleotide
  Target: LAMA2; (+) strand; PAM type: YTN; PAM sequence: TTC
taattactatcccctccatg

SEQ ID NO: 410802 - DNA, 20 bp, Artificial Sequence
  Description of Artificial Sequence: Synthetic oligonucleotide
  Target: LAMA2; (+) strand; PAM type: YTN; PAM sequence: CTA
attactatcccctccatgat

SEQ ID NO: 410803 - DNA, 20 bp, Artificial Sequence
  Description of Artificial Sequence: Synthetic oligonucleotide
  Target: LAMA2; (+) strand; PAM type: YTN; PAM sequence: TTA
ctatcccctccatgatcagt

SEQ ID NO: 410804 - DNA, 20 bp, Artificial Sequence
  Description of Artificial Sequence: Synthetic oligonucleotide
  Target: LAMA2; (+) strand; PAM type: YTN; PAM sequence: CTA
tcccctccatgatcagtatt

SEQ ID NO: 410805 - DNA, 20 bp, Artificial Sequence
  Description of Artificial Sequence: Synthetic oligonucleotide
  Target: LAMA2; (+) strand; PAM type: YTN; PAM sequence: CTC
catgatcagtattcttaaat

SEQ ID NO: 410806 - DNA, 20 bp, Artificial Sequence
  Description of Artificial Sequence: Synthetic oligonucleotide
  Target: LAMA2; (+) strand; PAM type: YTN; PAM sequence: TTC
ttaaatttgaaatattccct

SEQ ID NO: 410807 - DNA, 20 bp, Artificial Sequence
  Description of Artificial Sequence: Synthetic oligonucleotide
  Target: LAMA2; (+) strand; PAM type: YTN; PAM sequence: CTT
aaatttgaaatattcccttc

SEQ ID NO: 410808 - DNA, 20 bp, Artificial Sequence
  Description of Artificial Sequence: Synthetic oligonucleotide
  Target: LAMA2; (+) strand; PAM type: YTN; PAM sequence: TTA
aatttgaaatattcccttca

SEQ ID NO: 410809 - DNA, 20 bp, Artificial Sequence
  Description of Artificial Sequence: Synthetic oligonucleotide
  Target: LAMA2; (+) strand; PAM type: YTN; PAM sequence: TTT
gaaatattcccttcataata

SEQ ID NO: 410810 - DNA, 20 bp, Artificial Sequence
  Description of Artificial Sequence: Synthetic oligonucleotide
  Target: LAMA2; (+) strand; PAM type: YTN; PAM sequence: TTG
aaatattcccttcataatat

SEQ ID NO: 410811 - DNA, 20 bp, Artificial Sequence
  Description of Artificial Sequence: Synthetic oligonucleotide
  Target: LAMA2; (+) strand; PAM type: YTN; PAM sequence: TTC
ccttcataatatggcaccta

SEQ ID NO: 410812 - DNA, 20 bp, Artificial Sequence
  Description of Artificial Sequence: Synthetic oligonucleotide
  Target: LAMA2; (+) strand; PAM type: YTN; PAM sequence: CTT
cataatatggcacctactgc

SEQ ID NO: 410813 - DNA, 20 bp, Artificial Sequence
  Description of Artificial Sequence: Synthetic oligonucleotide
  Target: LAMA2; (+) strand; PAM type: YTN; PAM sequence: TTC
ataatatggcacctactgct

SEQ ID NO: 410814 - DNA, 20 bp, Artificial Sequence
  Description of Artificial Sequence: Synthetic oligonucleotide
  Target: LAMA2; (+) strand; PAM type: YTN; PAM sequence: CTA
ctgctcaaaaggaagtcacc

SEQ ID NO: 410815 - DNA, 20 bp, Artificial Sequence
  Description of Artificial Sequence: Synthetic oligonucleotide
  Target: LAMA2; (+) strand; PAM type: YTN; PAM sequence: CTG
ctcaaaaggaagtcaccagc

SEQ ID NO: 410816 - DNA, 20 bp, Artificial Sequence
  Description of Artificial Sequence: Synthetic oligonucleotide
  Target: LAMA2; (+) strand; PAM type: YTN; PAM sequence: CTC
aaaaggaagtcaccagctca

SEQ ID NO: 410817 - DNA, 20 bp, Artificial Sequence
  Description of Artificial Sequence: Synthetic oligonucleotide
  Target: LAMA2; (+) strand; PAM type: YTN; PAM sequence: CTC
aggggacagtgtgacccctc

SEQ ID NO: 410818 - DNA, 20 bp, Artificial Sequence
  Description of Artificial Sequence: Synthetic oligonucleotide
  Target: LAMA2; (+) strand; PAM type: YTN; PAM sequence: CTC
cctcccttaattgttaccat

SEQ ID NO: 410819 - DNA, 20 bp, Artificial Sequence
  Description of Artificial Sequence: Synthetic oligonucleotide
  Target: LAMA2; (+) strand; PAM type: YTN; PAM sequence: CTC
ccttaattgttaccatattt

SEQ ID NO: 410820 - DNA, 20 bp, Artificial Sequence
  Description of Artificial Sequence: Synthetic oligonucleotide
  Target: LAMA2; (+) strand; PAM type: YTN; PAM sequence: CTT
aattgttaccatatttctat

SEQ ID NO: 410821 - DNA, 20 bp, Artificial Sequence
  Description of Artificial Sequence: Synthetic oligonucleotide
  Target: LAMA2; (+) strand; PAM type: YTN; PAM sequence: TTA
attgttaccatatttctatt

SEQ ID NO: 410822 - DNA, 20 bp, Artificial Sequence
  Description of Artificial Sequence: Synthetic oligonucleotide
  Target: LAMA2; (+) strand; PAM type: YTN; PAM sequence: TTG
ttaccatatttctattaatg

SEQ ID NO: 410823 - DNA, 20 bp, Artificial Sequence
  Description of Artificial Sequence: Synthetic oligonucleotide
  Target: LAMA2; (+) strand; PAM type: YTN; PAM sequence: TTA
ccatatttctattaatgcac

SEQ ID NO: 410824 - DNA, 20 bp, Artificial Sequence
  Description of Artificial Sequence: Synthetic oligonucleotide
  Target: LAMA2; (+) strand; PAM type: YTN; PAM sequence: TTT
ctattaatgcacctaagaat

SEQ ID NO: 410825 - DNA, 20 bp, Artificial Sequence
  Description of Artificial Sequence: Synthetic oligonucleotide
  Target: LAMA2; (+) strand; PAM type: YTN; PAM sequence: TTC
tattaatgcacctaagaatg

SEQ ID NO: 410826 - DNA, 20 bp, Artificial Sequence
  Description of Artificial Sequence: Synthetic oligonucleotide
  Target: LAMA2; (+) strand; PAM type: YTN; PAM sequence: CTA
ttaatgcacctaagaatgtt

SEQ ID NO: 410827 - DNA, 20 bp, Artificial Sequence
  Description of Artificial Sequence: Synthetic oligonucleotide
  Target: LAMA2; (+) strand; PAM type: YTN; PAM sequence: TTA
atgcacctaagaatgtttta

SEQ ID NO: 410828 - DNA, 20 bp, Artificial Sequence
  Description of Artificial Sequence: Synthetic oligonucleotide
  Target: LAMA2; (+) strand; PAM type: YTN; PAM sequence: CTA
agaatgttttaatgttttta

SEQ ID NO: 410829 - DNA, 20 bp, Artificial Sequence
  Description of Artificial Sequence: Synthetic oligonucleotide
  Target: LAMA2; (+) strand; PAM type: YTN; PAM sequence: TTT
taatgtttttaatagatata

SEQ ID NO: 410830 - DNA, 20 bp, Artificial Sequence
  Description of Artificial Sequence: Synthetic oligonucleotide
  Target: LAMA2; (+) strand; PAM type: YTN; PAM sequence: TTT
aatgtttttaatagatatat

SEQ ID NO: 410831 - DNA, 20 bp, Artificial Sequence
  Description of Artificial Sequence: Synthetic oligonucleotide
  Target: LAMA2; (+) strand; PAM type: YTN; PAM sequence: TTA
atgtttttaatagatatatc

SEQ ID NO: 410832 - DNA, 20 bp, Artificial Sequence
  Description of Artificial Sequence: Synthetic oligonucleotide
  Target: LAMA2; (+) strand; PAM type: YTN; PAM sequence: TTT
ttaatagatatatcatgcta

SEQ ID NO: 410833 - DNA, 20 bp, Artificial Sequence
  Description of Artificial Sequence: Synthetic oligonucleotide
  Target: LAMA2; (+) strand; PAM type: YTN; PAM sequence: TTT
taatagatatatcatgctac

SEQ ID NO: 410834 - DNA, 20 bp, Artificial Sequence
  Description of Artificial Sequence: Synthetic oligonucleotide
  Target: LAMA2; (+) strand; PAM type: YTN; PAM sequence: TTT
aatagatatatcatgctact

SEQ ID NO: 410835 - DNA, 20 bp, Artificial Sequence
  Description of Artificial Sequence: Synthetic oligonucleotide
  Target: LAMA2; (+) strand; PAM type: YTN; PAM sequence: TTA
atagatatatcatgctacta

SEQ ID NO: 410836 - DNA, 20 bp, Artificial Sequence
  Description of Artificial Sequence: Synthetic oligonucleotide
  Target: LAMA2; (+) strand; PAM type: YTN; PAM sequence: CTA
ctaattccaaatcgggtacc

SEQ ID NO: 410837 - DNA, 20 bp, Artificial Sequence
  Description of Artificial Sequence: Synthetic oligonucleotide
  Target: LAMA2; (+) strand; PAM type: YTN; PAM sequence: CTA
attccaaatcgggtaccata

SEQ ID NO: 410838 - DNA, 20 bp, Artificial Sequence
  Description of Artificial Sequence: Synthetic oligonucleotide
  Target: LAMA2; (+) strand; PAM type: YTN; PAM sequence: TTC
caaatcgggtaccatattca

SEQ ID NO: 410839 - DNA, 20 bp, Artificial Sequence
  Description of Artificial Sequence: Synthetic oligonucleotide
  Target: LAMA2; (+) strand; PAM type: YTN; PAM sequence: TTC
aatcaagcagaacctcatgg

SEQ ID NO: 410840 - DNA, 20 bp, Artificial Sequence
  Description of Artificial Sequence: Synthetic oligonucleotide
  Target: LAMA2; (+) strand; PAM type: YTN; PAM sequence: CTC
atggaccttcttctctacca

SEQ ID NO: 410841 - DNA, 20 bp, Artificial Sequence
  Description of Artificial Sequence: Synthetic oligonucleotide
  Target: LAMA2; (+) strand; PAM type: YTN; PAM sequence: CTT
cttctctaccactagaacat

SEQ ID NO: 410842 - DNA, 20 bp, Artificial Sequence
  Description of Artificial Sequence: Synthetic oligonucleotide
  Target: LAMA2; (+) strand; PAM type: YTN; PAM sequence: TTC
ttctctaccactagaacatc

SEQ ID NO: 410843 - DNA, 20 bp, Artificial Sequence
  Description of Artificial Sequence: Synthetic oligonucleotide
  Target: LAMA2; (+) strand; PAM type: YTN; PAM sequence: CTT
ctctaccactagaacatcct

SEQ ID NO: 410844 - DNA, 20 bp, Artificial Sequence
  Description of Artificial Sequence: Synthetic oligonucleotide
  Target: LAMA2; (+) strand; PAM type: YTN; PAM sequence: TTC
tctaccactagaacatcctc

SEQ ID NO: 410845 - DNA, 20 bp, Artificial Sequence
  Description of Artificial Sequence: Synthetic oligonucleotide
  Target: LAMA2; (+) strand; PAM type: YTN; PAM sequence: CTC
taccactagaacatcctcca

SEQ ID NO: 410846 - DNA, 20 bp, Artificial Sequence
  Description of Artificial Sequence: Synthetic oligonucleotide
  Target: LAMA2; (+) strand; PAM type: YTN; PAM sequence: CTA
ccactagaacatcctccagg

SEQ ID NO: 410847 - DNA, 20 bp, Artificial Sequence
  Description of Artificial Sequence: Synthetic oligonucleotide
  Target: LAMA2; (+) strand; PAM type: YTN; PAM sequence: CTA
gaacatcctccaggcaggtc

SEQ ID NO: 410848 - DNA, 20 bp, Artificial Sequence
  Description of Artificial Sequence: Synthetic oligonucleotide
  Target: LAMA2; (+) strand; PAM type: YTN; PAM sequence: CTC
caggcaggtctctcagcctg

SEQ ID NO: 410849 - DNA, 20 bp, Artificial Sequence
  Description of Artificial Sequence: Synthetic oligonucleotide
  Target: LAMA2; (+) strand; PAM type: YTN; PAM sequence: CTC
tcagcctgtgctggtttgga

SEQ ID NO: 410850 - DNA, 20 bp, Artificial Sequence
  Description of Artificial Sequence: Synthetic oligonucleotide
  Target: LAMA2; (+) strand; PAM type: YTN; PAM sequence: CTC
agcctgtgctggtttggatt

SEQ ID NO: 410851 - DNA, 20 bp, Artificial Sequence
  Description of Artificial Sequence: Synthetic oligonucleotide
  Target: LAMA2; (+) strand; PAM type: YTN; PAM sequence: CTG
tgctggtttggatttttagg

SEQ ID NO: 410852 - DNA, 20 bp, Artificial Sequence
  Description of Artificial Sequence: Synthetic oligonucleotide
  Target: LAMA2; (+) strand; PAM type: YTN; PAM sequence: CTG
gtttggatttttagggataa

SEQ ID NO: 410853 - DNA, 20 bp, Artificial Sequence
  Description of Artificial Sequence: Synthetic oligonucleotide
  Target: LAMA2; (+) strand; PAM type: YTN; PAM sequence: TTT
ggatttttagggataaccct

SEQ ID NO: 410854 - DNA, 20 bp, Artificial Sequence
  Description of Artificial Sequence: Synthetic oligonucleotide
  Target: LAMA2; (+) strand; PAM type: YTN; PAM sequence: TTG
gatttttagggataaccctg

SEQ ID NO: 410855 - DNA, 20 bp, Artificial Sequence
  Description of Artificial Sequence: Synthetic oligonucleotide
  Target: LAMA2; (+) strand; PAM type: YTN; PAM sequence: TTT
ttagggataaccctgccagc

SEQ ID NO: 410856 - DNA, 20 bp, Artificial Sequence
  Description of Artificial Sequence: Synthetic oligonucleotide
  Target: LAMA2; (+) strand; PAM type: YTN; PAM sequence: TTT
tagggataaccctgccagcc

SEQ ID NO: 410857 - DNA, 20 bp, Artificial Sequence
  Description of Artificial Sequence: Synthetic oligonucleotide
  Target: LAMA2; (+) strand; PAM type: YTN; PAM sequence: TTT
agggataaccctgccagcct

SEQ ID NO: 410858 - DNA, 20 bp, Artificial Sequence
  Description of Artificial Sequence: Synthetic oligonucleotide
  Target: LAMA2; (+) strand; PAM type: YTN; PAM sequence: TTA
gggataaccctgccagcctc

SEQ ID NO: 410859 - DNA, 20 bp, Artificial Sequence
  Description of Artificial Sequence: Synthetic oligonucleotide
  Target: LAMA2; (+) strand; PAM type: YTN; PAM sequence: CTG
ccagcctccatggatcacct

SEQ ID NO: 410860 - DNA, 20 bp, Artificial Sequence
  Description of Artificial Sequence: Synthetic oligonucleotide
  Target: LAMA2; (+) strand; PAM type: YTN; PAM sequence: CTC
catggatcaccttacttttc

SEQ ID NO: 410861 - DNA, 20 bp, Artificial Sequence
  Description of Artificial Sequence: Synthetic oligonucleotide
  Target: LAMA2; (+) strand; PAM type: YTN; PAM sequence: CTT
acttttctaagtacttacac

SEQ ID NO: 410862 - DNA, 20 bp, Artificial Sequence
  Description of Artificial Sequence: Synthetic oligonucleotide
  Target: LAMA2; (+) strand; PAM type: YTN; PAM sequence: TTA
cttttctaagtacttacaca

SEQ ID NO: 410863 - DNA, 20 bp, Artificial Sequence
  Description of Artificial Sequence: Synthetic oligonucleotide
  Target: LAMA2; (+) strand; PAM type: YTN; PAM sequence: CTT
ttctaagtacttacacaaac

SEQ ID NO: 410864 - DNA, 20 bp, Artificial Sequence
  Description of Artificial Sequence: Synthetic oligonucleotide
  Target: LAMA2; (+) strand; PAM type: YTN; PAM sequence: TTT
tctaagtacttacacaaact

SEQ ID NO: 410865 - DNA, 20 bp, Artificial Sequence
  Description of Artificial Sequence: Synthetic oligonucleotide
  Target: LAMA2; (+) strand; PAM type: YTN; PAM sequence: TTT
ctaagtacttacacaaactg

SEQ ID NO: 410866 - DNA, 20 bp, Artificial Sequence
  Description of Artificial Sequence: Synthetic oligonucleotide
  Target: LAMA2; (+) strand; PAM type: YTN; PAM sequence: TTC
taagtacttacacaaactgc

SEQ ID NO: 410867 - DNA, 20 bp, Artificial Sequence
  Description of Artificial Sequence: Synthetic oligonucleotide
  Target: LAMA2; (+) strand; PAM type: YTN; PAM sequence: CTA
agtacttacacaaactgcat

SEQ ID NO: 410868 - DNA, 20 bp, Artificial Sequence
  Description of Artificial Sequence: Synthetic oligonucleotide
  Target: LAMA2; (+) strand; PAM type: YTN; PAM sequence: CTT
acacaaactgcattttatag

SEQ ID NO: 410869 - DNA, 20 bp, Artificial Sequence
  Description of Artificial Sequence: Synthetic oligonucleotide
  Target: LAMA2; (+) strand; PAM type: YTN; PAM sequence: TTA
cacaaactgcattttatagg

SEQ ID NO: 410870 - DNA, 20 bp, Artificial Sequence
  Description of Artificial Sequence: Synthetic oligonucleotide
  Target: LAMA2; (+) strand; PAM type: YTN; PAM sequence: CTG
cattttatagggcctctcaa

SEQ ID NO: 410871 - DNA, 20 bp, Artificial Sequence
  Description of Artificial Sequence: Synthetic oligonucleotide
  Target: LAMA2; (+) strand; PAM type: YTN; PAM sequence: TTT
tatagggcctctcaagcaca

SEQ ID NO: 410872 - DNA, 20 bp, Artificial Sequence
  Description of Artificial Sequence: Synthetic oligonucleotide
  Target: LAMA2; (+) strand; PAM type: YTN; PAM sequence: TTT
atagggcctctcaagcacat

SEQ ID NO: 410873 - DNA, 20 bp, Artificial Sequence
  Description of Artificial Sequence: Synthetic oligonucleotide
  Target: LAMA2; (+) strand; PAM type: YTN; PAM sequence: TTA
tagggcctctcaagcacatt

SEQ ID NO: 410874 - DNA, 20 bp, Artificial Sequence
  Description of Artificial Sequence: Synthetic oligonucleotide
  Target: LAMA2; (+) strand; PAM type: YTN; PAM sequence: CTC
tcaagcacatttttctgtgg

SEQ ID NO: 410875 - DNA, 20 bp, Artificial Sequence
  Description of Artificial Sequence: Synthetic oligonucleotide
  Target: LAMA2; (+) strand; PAM type: YTN; PAM sequence: CTC
aagcacatttttctgtggta

SEQ ID NO: 410876 - DNA, 20 bp, Artificial Sequence
  Description of Artificial Sequence: Synthetic oligonucleotide
  Target: LAMA2; (+) strand; PAM type: YTN; PAM sequence: TTT
ttctgtggtatttagagatc

SEQ ID NO: 410877 - DNA, 20 bp, Artificial Sequence
  Description of Artificial Sequence: Synthetic oligonucleotide
  Target: LAMA2; (+) strand; PAM type: YTN; PAM sequence: TTT
tctgtggtatttagagatca

SEQ ID NO: 410878 - DNA, 20 bp, Artificial Sequence
  Description of Artificial Sequence: Synthetic oligonucleotide
  Target: LAMA2; (+) strand; PAM type: YTN; PAM sequence: TTT
ctgtggtatttagagatcac

SEQ ID NO: 410879 - DNA, 20 bp, Artificial Sequence
  Description of Artificial Sequence: Synthetic oligonucleotide
  Target: LAMA2; (+) strand; PAM type: YTN; PAM sequence: TTC
tgtggtatttagagatcaca

SEQ ID NO: 410880 - DNA, 20 bp, Artificial Sequence
  Description of Artificial Sequence: Synthetic oligonucleotide
  Target: LAMA2; (+) strand; PAM type: YTN; PAM sequence: CTG
tggtatttagagatcacact

SEQ ID NO: 410881 - DNA, 20 bp, Artificial Sequence
  Description of Artificial Sequence: Synthetic oligonucleotide
  Target: LAMA2; (+) strand; PAM type: YTN; PAM sequence: TTT
agagatcacactttttcctt

SEQ ID NO: 410882 - DNA, 20 bp, Artificial Sequence
  Description of Artificial Sequence: Synthetic oligonucleotide
  Target: LAMA2; (+) strand; PAM type: YTN; PAM sequence: TTA
gagatcacactttttccttt

SEQ ID NO: 410883 - DNA, 20 bp, Artificial Sequence
  Description of Artificial Sequence: Synthetic oligonucleotide
  Target: LAMA2; (+) strand; PAM type: YTN; PAM sequence: CTT
tttccttttttctcaaaata

SEQ ID NO: 410884 - DNA, 20 bp, Artificial Sequence
  Description of Artificial Sequence: Synthetic oligonucleotide
  Target: LAMA2; (+) strand; PAM type: YTN; PAM sequence: TTT
ttccttttttctcaaaataa

SEQ ID NO: 410885 - DNA, 20 bp, Artificial Sequence
  Description of Artificial Sequence: Synthetic oligonucleotide
  Target: LAMA2; (+) strand; PAM type: YTN; PAM sequence: TTT
tccttttttctcaaaataaa

SEQ ID NO: 410886 - DNA, 20 bp, Artificial Sequence
  Description of Artificial Sequence: Synthetic oligonucleotide
  Target: LAMA2; (+) strand; PAM type: YTN; PAM sequence: TTT
ccttttttctcaaaataaag

SEQ ID NO: 410887 - DNA, 20 bp, Artificial Sequence
  Description of Artificial Sequence: Synthetic oligonucleotide
  Target: LAMA2; (+) strand; PAM type: YTN; PAM sequence: TTC
cttttttctcaaaataaaga

SEQ ID NO: 410888 - DNA, 20 bp, Artificial Sequence
  Description of Artificial Sequence: Synthetic oligonucleotide
  Target: LAMA2; (+) strand; PAM type: YTN; PAM sequence: CTT
ttttctcaaaataaagatac

SEQ ID NO: 410889 - DNA, 20 bp, Artificial Sequence
  Description of Artificial Sequence: Synthetic oligonucleotide
  Target: LAMA2; (+) strand; PAM type: YTN; PAM sequence: TTT
tttctcaaaataaagatact

SEQ ID NO: 410890 - DNA, 20 bp, Artificial Sequence
  Description of Artificial Sequence: Synthetic oligonucleotide
  Target: LAMA2; (+) strand; PAM type: YTN; PAM sequence: TTT
ttctcaaaataaagatactt

SEQ ID NO: 410891 - DNA, 20 bp, Artificial Sequence
  Description of Artificial Sequence: Synthetic oligonucleotide
  Target: LAMA2; (+) strand; PAM type: YTN; PAM sequence: TTT
tctcaaaataaagatacttg

SEQ ID NO: 410892 - DNA, 20 bp, Artificial Sequence
  Description of Artificial Sequence: Synthetic oligonucleotide
  Target: LAMA2; (+) strand; PAM type: YTN; PAM sequence: TTT
ctcaaaataaagatacttgc

SEQ ID NO: 410893 - DNA, 20 bp, Artificial Sequence
  Description of Artificial Sequence: Synthetic oligonucleotide
  Target: LAMA2; (+) strand; PAM type: YTN; PAM sequence: TTC
tcaaaataaagatacttgcc

SEQ ID NO: 410894 - DNA, 20 bp, Artificial Sequence
  Description of Artificial Sequence: Synthetic oligonucleotide
  Target: LAMA2; (+) strand; PAM type: YTN; PAM sequence: CTC
aaaataaagatacttgccca

SEQ ID NO: 410895 - DNA, 20 bp, Artificial Sequence
  Description of Artificial Sequence: Synthetic oligonucleotide
  Target: LAMA2; (+) strand; PAM type: YTN; PAM sequence: CTT
gcccatctgggaatggagat

SEQ ID NO: 410896 - DNA, 20 bp, Artificial Sequence
  Description of Artificial Sequence: Synthetic oligonucleotide
  Target: LAMA2; (+) strand; PAM type: YTN; PAM sequence: TTG
cccatctgggaatggagatt

SEQ ID NO: 410897 - DNA, 20 bp, Artificial Sequence
  Description of Artificial Sequence: Synthetic oligonucleotide
  Target: LAMA2; (+) strand; PAM type: YTN; PAM sequence: CTG
ggaatggagatttttactca

SEQ ID NO: 410898 - DNA, 20 bp, Artificial Sequence
  Description of Artificial Sequence: Synthetic oligonucleotide
  Target: LAMA2; (+) strand; PAM type: YTN; PAM sequence: TTT
ttactcatttaaggttcttt

SEQ ID NO: 410899 - DNA, 20 bp, Artificial Sequence
  Description of Artificial Sequence: Synthetic oligonucleotide
  Target: LAMA2; (+) strand; PAM type: YTN; PAM sequence: TTT
tactcatttaaggttctttt

SEQ ID NO: 410900 - DNA, 20 bp, Artificial Sequence
  Description of Artificial Sequence: Synthetic oligonucleotide
  Target: LAMA2; (+) strand; PAM type: YTN; PAM sequence: TTT
actcatttaaggttcttttt

SEQ ID NO: 410901 - DNA, 20 bp, Artificial Sequence
  Description of Artificial Sequence: Synthetic oligonucleotide
  Target: LAMA2; (+) strand; PAM type: YTN; PAM sequence: TTA
ctcatttaaggttctttttt

SEQ ID NO: 410902 - DNA, 20 bp, Artificial Sequence
  Description of Artificial Sequence: Synthetic oligonucleotide
  Target: LAMA2; (+) strand; PAM type: YTN; PAM sequence: CTC
atttaaggttcttttttttt

SEQ ID NO: 410903 - DNA, 20 bp, Artificial Sequence
  Description of Artificial Sequence: Synthetic oligonucleotide
  Target: LAMA2; (+) strand; PAM type: YTN; PAM sequence: TTT
aaggttctttttttttttta

SEQ ID NO: 410904 - DNA, 20 bp, Artificial Sequence
  Description of Artificial Sequence: Synthetic oligonucleotide
  Target: LAMA2; (+) strand; PAM type: YTN; PAM sequence: TTA
aggttcttttttttttttat

SEQ ID NO: 410905 - DNA, 20 bp, Artificial Sequence
  Description of Artificial Sequence: Synthetic oligonucleotide
  Target: LAMA2; (+) strand; PAM type: YTN; PAM sequence: TTC
ttttttttttttataacctt

SEQ ID NO: 410906 - DNA, 20 bp, Artificial Sequence
  Description of Artificial Sequence: Synthetic oligonucleotide
  Target: LAMA2; (+) strand; PAM type: YTN; PAM sequence: CTT
ttttttttttataaccttct

SEQ ID NO: 410907 - DNA, 20 bp, Artificial Sequence
  Description of Artificial Sequence: Synthetic oligonucleotide
  Target: LAMA2; (+) strand; PAM type: YTN; PAM sequence: TTT
tttttttttataaccttctg

SEQ ID NO: 410908 - DNA, 20 bp, Artificial Sequence
  Description of Artificial Sequence: Synthetic oligonucleotide
  Target: LAMA2; (+) strand; PAM type: YTN; PAM sequence: TTT
ttttttttataaccttctgt

SEQ ID NO: 410909 - DNA, 20 bp, Artificial Sequence
  Description of Artificial Sequence: Synthetic oligonucleotide
  Target: LAMA2; (+) strand; PAM type: YTN; PAM sequence: TTT
tttttttataaccttctgtt

SEQ ID NO: 410910 - DNA, 20 bp, Artificial Sequence
  Description of Artificial Sequence: Synthetic oligonucleotide
  Target: LAMA2; (+) strand; PAM type: YTN; PAM sequence: TTT
ttttttataaccttctgttc

SEQ ID NO: 410911 - DNA, 20 bp, Artificial Sequence
  Description of Artificial Sequence: Synthetic oligonucleotide
  Target: LAMA2; (+) strand; PAM type: YTN; PAM sequence: TTT
tttttataaccttctgttct

SEQ ID NO: 410912 - DNA, 20 bp, Artificial Sequence
  Description of Artificial Sequence: Synthetic oligonucleotide
  Target: LAMA2; (+) strand; PAM type: YTN; PAM sequence: TTT
ttttataaccttctgttcta

SEQ ID NO: 410913 - DNA, 20 bp, Artificial Sequence
  Description of Artificial Sequence: Synthetic oligonucleotide
  Target: LAMA2; (+) strand; PAM type: YTN; PAM sequence: TTT
tttataaccttctgttctaa

SEQ ID NO: 410914 - DNA, 20 bp, Artificial Sequence
  Description of Artificial Sequence: Synthetic oligonucleotide
  Target: LAMA2; (+) strand; PAM type: YTN; PAM sequence: TTT
ttataaccttctgttctaat

SEQ ID NO: 410915 - DNA, 20 bp, Artificial Sequence
  Description of Artificial Sequence: Synthetic oligonucleotide
  Target: LAMA2; (+) strand; PAM type: YTN; PAM sequence: TTT
tataaccttctgttctaatt

SEQ ID NO: 410916 - DNA, 20 bp, Artificial Sequence
  Description of Artificial Sequence: Synthetic oligonucleotide
  Target: LAMA2; (+) strand; PAM type: YTN; PAM sequence: TTT
ataaccttctgttctaattt

SEQ ID NO: 410917 - DNA, 20 bp, Artificial Sequence
  Description of Artificial Sequence: Synthetic oligonucleotide
  Target: LAMA2; (+) strand; PAM type: YTN; PAM sequence: TTA
taaccttctgttctaatttc

SEQ ID NO: 410918 - DNA, 20 bp, Artificial Sequence
  Description of Artificial Sequence: Synthetic oligonucleotide
  Target: LAMA2; (+) strand; PAM type: YTN; PAM sequence: CTT
ctgttctaatttcgatttcc

SEQ ID NO: 410919 - DNA, 20 bp, Artificial Sequence
  Description of Artificial Sequence: Synthetic oligonucleotide
  Target: LAMA2; (+) strand; PAM type: YTN; PAM sequence: TTC
tgttctaatttcgatttcca

SEQ ID NO: 410920 - DNA, 20 bp, Artificial Sequence
  Description of Artificial Sequence: Synthetic oligonucleotide
  Target: LAMA2; (+) strand; PAM type: YTN; PAM sequence: CTG
ttctaatttcgatttccatt

SEQ ID NO: 410921 - DNA, 20 bp, Artificial Sequence
  Description of Artificial Sequence: Synthetic oligonucleotide
  Target: LAMA2; (+) strand; PAM type: YTN; PAM sequence: TTC
taatttcgatttccatttcc

SEQ ID NO: 410922 - DNA, 20 bp, Artificial Sequence
  Description of Artificial Sequence: Synthetic oligonucleotide
  Target: LAMA2; (+) strand; PAM type: YTN; PAM sequence: CTA
atttcgatttccatttcctc

SEQ ID NO: 410923 - DNA, 20 bp, Artificial Sequence
  Description of Artificial Sequence: Synthetic oligonucleotide
  Target: LAMA2; (+) strand; PAM type: YTN; PAM sequence: TTT
cgatttccatttcctctcag

SEQ ID NO: 410924 - DNA, 20 bp, Artificial Sequence
  Description of Artificial Sequence: Synthetic oligonucleotide
  Target: LAMA2; (+) strand; PAM type: YTN; PAM sequence: TTC
gatttccatttcctctcagc

SEQ ID NO: 410925 - DNA, 20 bp, Artificial Sequence
  Description of Artificial Sequence: Synthetic oligonucleotide
  Target: LAMA2; (+) strand; PAM type: YTN; PAM sequence: TTT
ccatttcctctcagcagtgt

SEQ ID NO: 410926 - DNA, 20 bp, Artificial Sequence
  Description of Artificial Sequence: Synthetic oligonucleotide
  Target: LAMA2; (+) strand; PAM type: YTN; PAM sequence: TTC
catttcctctcagcagtgta

SEQ ID NO: 410927 - DNA, 20 bp, Artificial Sequence
  Description of Artificial Sequence: Synthetic oligonucleotide
  Target: LAMA2; (+) strand; PAM type: YTN; PAM sequence: TTT
cctctcagcagtgtatgttt

SEQ ID NO: 410928 - DNA, 20 bp, Artificial Sequence
  Description of Artificial Sequence: Synthetic oligonucleotide
  Target: LAMA2; (+) strand; PAM type: YTN; PAM sequence: TTC
ctctcagcagtgtatgtttt

SEQ ID NO: 410929 - DNA, 20 bp, Artificial Sequence
  Description of Artificial Sequence: Synthetic oligonucleotide
  Target: LAMA2; (+) strand; PAM type: YTN; PAM sequence: CTC
tcagcagtgtatgttttaac

SEQ ID NO: 410930 - DNA, 20 bp, Artificial Sequence
  Description of Artificial Sequence: Synthetic oligonucleotide
  Target: LAMA2; (+) strand; PAM type: YTN; PAM sequence: CTC
agcagtgtatgttttaactt

SEQ ID NO: 410931 - DNA, 20 bp, Artificial Sequence
  Description of Artificial Sequence: Synthetic oligonucleotide
  Target: LAMA2; (+) strand; PAM type: YTN; PAM sequence: TTT
taacttttccgaaaacagag

SEQ ID NO: 410932 - DNA, 20 bp, Artificial Sequence
  Description of Artificial Sequence: Synthetic oligonucleotide
  Target: LAMA2; (+) strand; PAM type: YTN; PAM sequence: TTT
aacttttccgaaaacagagc

SEQ ID NO: 410933 - DNA, 20 bp, Artificial Sequence
  Description of Artificial Sequence: Synthetic oligonucleotide
  Target: LAMA2; (+) strand; PAM type: YTN; PAM sequence: TTA
acttttccgaaaacagagca

SEQ ID NO: 410934 - DNA, 20 bp, Artificial Sequence
  Description of Artificial Sequence: Synthetic oligonucleotide
  Target: LAMA2; (+) strand; PAM type: YTN; PAM sequence: CTT
ttccgaaaacagagcattcc

SEQ ID NO: 410935 - DNA, 20 bp, Artificial Sequence
  Description of Artificial Sequence: Synthetic oligonucleotide
  Target: LAMA2; (+) strand; PAM type: YTN; PAM sequence: TTT
tccgaaaacagagcattcca

SEQ ID NO: 410936 - DNA, 20 bp, Artificial Sequence
  Description of Artificial Sequence: Synthetic oligonucleotide
  Target: LAMA2; (+) strand; PAM type: YTN; PAM sequence: TTT
ccgaaaacagagcattccac

SEQ ID NO: 410937 - DNA, 20 bp, Artificial Sequence
  Description of Artificial Sequence: Synthetic oligonucleotide
  Target: LAMA2; (+) strand; PAM type: YTN; PAM sequence: TTC
cgaaaacagagcattccact

SEQ ID NO: 410938 - DNA, 20 bp, Artificial Sequence
  Description of Artificial Sequence: Synthetic oligonucleotide
  Target: LAMA2; (+) strand; PAM type: YTN; PAM sequence: TTC
cacttagtagatgagacaga

SEQ ID NO: 410939 - DNA, 20 bp, Artificial Sequence
  Description of Artificial Sequence: Synthetic oligonucleotide
  Target: LAMA2; (+) strand; PAM type: YTN; PAM sequence: CTT
agtagatgagacagaagcaa

SEQ ID NO: 410940 - DNA, 20 bp, Artificial Sequence
  Description of Artificial Sequence: Synthetic oligonucleotide
  Target: LAMA2; (+) strand; PAM type: YTN; PAM sequence: TTA
gtagatgagacagaagcaaa

SEQ ID NO: 410941 - DNA, 20 bp, Artificial Sequence
  Description of Artificial Sequence: Synthetic oligonucleotide
  Target: LAMA2; (+) strand; PAM type: YTN; PAM sequence: TTG
agtagcatgccaaattggtt

SEQ ID NO: 410942 - DNA, 20 bp, Artificial Sequence
  Description of Artificial Sequence: Synthetic oligonucleotide
  Target: LAMA2; (+) strand; PAM type: YTN; PAM sequence: TTG
gttggtttagaaagaatcac

SEQ ID NO: 410943 - DNA, 20 bp, Artificial Sequence
  Description of Artificial Sequence: Synthetic oligonucleotide
  Target: LAMA2; (+) strand; PAM type: YTN; PAM sequence: TTG
gtttagaaagaatcacagaa

SEQ ID NO: 410944 - DNA, 20 bp, Artificial Sequence
  Description of Artificial Sequence: Synthetic oligonucleotide
  Target: LAMA2; (+) strand; PAM type: YTN; PAM sequence: TTT
agaaagaatcacagaacatt

SEQ ID NO: 410945 - DNA, 20 bp, Artificial Sequence
  Description of Artificial Sequence: Synthetic oligonucleotide
  Target: LAMA2; (+) strand; PAM type: YTN; PAM sequence: TTA
gaaagaatcacagaacatta

SEQ ID NO: 410946 - DNA, 20 bp, Artificial Sequence
  Description of Artificial Sequence: Synthetic oligonucleotide
  Target: LAMA2; (+) strand; PAM type: YTN; PAM sequence: TTA
gagctagaagacaccctaaa

SEQ ID NO: 410947 - DNA, 20 bp, Artificial Sequence
  Description of Artificial Sequence: Synthetic oligonucleotide
  Target: LAMA2; (+) strand; PAM type: YTN; PAM sequence: CTA
gaagacaccctaaagattcc

SEQ ID NO: 410948 - DNA, 20 bp, Artificial Sequence
  Description of Artificial Sequence: Synthetic oligonucleotide
  Target: LAMA2; (+) strand; PAM type: YTN; PAM sequence: CTA
aagattccaactcttaactt

SEQ ID NO: 410949 - DNA, 20 bp, Artificial Sequence
  Description of Artificial Sequence: Synthetic oligonucleotide
  Target: LAMA2; (+) strand; PAM type: YTN; PAM sequence: TTC
caactcttaacttgcacatg

SEQ ID NO: 410950 - DNA, 20 bp, Artificial Sequence
  Description of Artificial Sequence: Synthetic oligonucleotide
  Target: LAMA2; (+) strand; PAM type: YTN; PAM sequence: CTC
ttaacttgcacatgaggaaa

SEQ ID NO: 410951 - DNA, 20 bp, Artificial Sequence
  Description of Artificial Sequence: Synthetic oligonucleotide
  Target: LAMA2; (+) strand; PAM type: YTN; PAM sequence: CTT
aacttgcacatgaggaaaga

SEQ ID NO: 410952 - DNA, 20 bp, Artificial Sequence
  Description of Artificial Sequence: Synthetic oligonucleotide
  Target: LAMA2; (+) strand; PAM type: YTN; PAM sequence: TTA
acttgcacatgaggaaagaa

SEQ ID NO: 410953 - DNA, 20 bp, Artificial Sequence
  Description of Artificial Sequence: Synthetic oligonucleotide
  Target: LAMA2; (+) strand; PAM type: YTN; PAM sequence: CTT
gcacatgaggaaagaaagcc

SEQ ID NO: 410954 - DNA, 20 bp, Artificial Sequence
  Description of Artificial Sequence: Synthetic oligonucleotide
  Target: LAMA2; (+) strand; PAM type: YTN; PAM sequence: TTG
cacatgaggaaagaaagccc

SEQ ID NO: 410955 - DNA, 20 bp, Artificial Sequence
  Description of Artificial Sequence: Synthetic oligonucleotide
  Target: LAMA2; (+) strand; PAM type: YTN; PAM sequence: CTC
aaacttacagcatggcccag

SEQ ID NO: 410956 - DNA, 20 bp, Artificial Sequence
  Description of Artificial Sequence: Synthetic oligonucleotide
  Target: LAMA2; (+) strand; PAM type: YTN; PAM sequence: CTT
acagcatggcccagggggtt

SEQ ID NO: 410957 - DNA, 20 bp, Artificial Sequence
  Description of Artificial Sequence: Synthetic oligonucleotide
  Target: LAMA2; (+) strand; PAM type: YTN; PAM sequence: TTA
cagcatggcccagggggtta

SEQ ID NO: 410958 - DNA, 20 bp, Artificial Sequence
  Description of Artificial Sequence: Synthetic oligonucleotide
  Target: LAMA2; (+) strand; PAM type: YTN; PAM sequence: TTA
cacacatgagcgatagttgg

SEQ ID NO: 410959 - DNA, 20 bp, Artificial Sequence
  Description of Artificial Sequence: Synthetic oligonucleotide
  Target: LAMA2; (+) strand; PAM type: YTN; PAM sequence: TTG
gcactaaaacccagatatct

SEQ ID NO: 410960 - DNA, 20 bp, Artificial Sequence
  Description of Artificial Sequence: Synthetic oligonucleotide
  Target: LAMA2; (+) strand; PAM type: YTN; PAM sequence: CTA
aaacccagatatctaaattc

SEQ ID NO: 410961 - DNA, 20 bp, Artificial Sequence
  Description of Artificial Sequence: Synthetic oligonucleotide
  Target: LAMA2; (+) strand; PAM type: YTN; PAM sequence: CTA
aattccaactgctatttcac

SEQ ID NO: 410962 - DNA, 20 bp, Artificial Sequence
  Description of Artificial Sequence: Synthetic oligonucleotide
  Target: LAMA2; (+) strand; PAM type: YTN; PAM sequence: TTC
caactgctatttcaccttct

SEQ ID NO: 410963 - DNA, 20 bp, Artificial Sequence
  Description of Artificial Sequence: Synthetic oligonucleotide
  Target: LAMA2; (+) strand; PAM type: YTN; PAM sequence: CTG
ctatttcaccttctttttgt

SEQ ID NO: 410964 - DNA, 20 bp, Artificial Sequence
  Description of Artificial Sequence: Synthetic oligonucleotide
  Target: LAMA2; (+) strand; PAM type: YTN; PAM sequence: CTA
tttcaccttctttttgtttg

SEQ ID NO: 410965 - DNA, 20 bp, Artificial Sequence
  Description of Artificial Sequence: Synthetic oligonucleotide
  Target: LAMA2; (+) strand; PAM type: YTN; PAM sequence: TTT
caccttctttttgtttgttt

SEQ ID NO: 410966 - DNA, 20 bp, Artificial Sequence
  Description of Artificial Sequence: Synthetic oligonucleotide
  Target: LAMA2; (+) strand; PAM type: YTN; PAM sequence: TTC
accttctttttgtttgtttg

SEQ ID NO: 410967 - DNA, 20 bp, Artificial Sequence
  Description of Artificial Sequence: Synthetic oligonucleotide
  Target: LAMA2; (+) strand; PAM type: YTN; PAM sequence: CTT
ctttttgtttgtttgtttgt

SEQ ID NO: 410968 - DNA, 20 bp, Artificial Sequence
  Description of Artificial Sequence: Synthetic oligonucleotide
  Target: LAMA2; (+) strand; PAM type: YTN; PAM sequence: TTC
tttttgtttgtttgtttgtt

SEQ ID NO: 410969 - DNA, 20 bp, Artificial Sequence
  Description of Artificial Sequence: Synthetic oligonucleotide
  Target: LAMA2; (+) strand; PAM type: YTN; PAM sequence: CTT
tttgtttgtttgtttgtttg

SEQ ID NO: 410970 - DNA, 20 bp, Artificial Sequence
  Description of Artificial Sequence: Synthetic oligonucleotide
  Target: LAMA2; (+) strand; PAM type: YTN; PAM sequence: TTT
ttgtttgtttgtttgtttgt

SEQ ID NO: 410971 - DNA, 20 bp, Artificial Sequence
  Description of Artificial Sequence: Synthetic oligonucleotide
  Target: LAMA2; (+) strand; PAM type: YTN; PAM sequence: TTT
tgtttgtttgtttgtttgtc

SEQ ID NO: 410972 - DNA, 20 bp, Artificial Sequence
  Description of Artificial Sequence: Synthetic oligonucleotide
  Target: LAMA2; (+) strand; PAM type: YTN; PAM sequence: TTT
gtttgtttgtttgtttgtct

SEQ ID NO: 410973 - DNA, 20 bp, Artificial Sequence
  Description of Artificial Sequence: Synthetic oligonucleotide
  Target: LAMA2; (+) strand; PAM type: YTN; PAM sequence: TTG
tttgtttgtttgtttgtctg

SEQ ID NO: 410974 - DNA, 20 bp, Artificial Sequence
  Description of Artificial Sequence: Synthetic oligonucleotide
  Target: LAMA2; (+) strand; PAM type: YTN; PAM sequence: TTT
gtttgtttgtttgtctgttt

SEQ ID NO: 410975 - DNA, 20 bp, Artificial Sequence
  Description of Artificial Sequence: Synthetic oligonucleotide
  Target: LAMA2; (+) strand; PAM type: YTN; PAM sequence: TTG
tttgtttgtttgtctgtttt

SEQ ID NO: 410976 - DNA, 20 bp, Artificial Sequence
  Description of Artificial Sequence: Synthetic oligonucleotide
  Target: LAMA2; (+) strand; PAM type: YTN; PAM sequence: TTT
gtttgtttgtctgttttttg

SEQ ID NO: 410977 - DNA, 20 bp, Artificial Sequence
  Description of Artificial Sequence: Synthetic oligonucleotide
  Target: LAMA2; (+) strand; PAM type: YTN; PAM sequence: TTG
tttgtttgtctgttttttga

SEQ ID NO: 410978 - DNA, 20 bp, Artificial Sequence
  Description of Artificial Sequence: Synthetic oligonucleotide
  Target: LAMA2; (+) strand; PAM type: YTN; PAM sequence: TTT
gtttgtctgttttttgagat

SEQ ID NO: 410979 - DNA, 20 bp, Artificial Sequence
  Description of Artificial Sequence: Synthetic oligonucleotide
  Target: LAMA2; (+) strand; PAM type: YTN; PAM sequence: TTG
tttgtctgttttttgagatg

SEQ ID NO: 410980 - DNA, 20 bp, Artificial Sequence
  Description of Artificial Sequence: Synthetic oligonucleotide
  Target: LAMA2; (+) strand; PAM type: YTN; PAM sequence: TTT
gtctgttttttgagatggag

SEQ ID NO: 410981 - DNA, 20 bp, Artificial Sequence
  Description of Artificial Sequence: Synthetic oligonucleotide
  Target: LAMA2; (+) strand; PAM type: YTN; PAM sequence: TTG
tctgttttttgagatggagt

SEQ ID NO: 410982 - DNA, 20 bp, Artificial Sequence
  Description of Artificial Sequence: Synthetic oligonucleotide
  Target: LAMA2; (+) strand; PAM type: YTN; PAM sequence: CTG
ttttttgagatggagtttca

SEQ ID NO: 410983 - DNA, 20 bp, Artificial Sequence
  Description of Artificial Sequence: Synthetic oligonucleotide
  Target: LAMA2; (+) strand; PAM type: YTN; PAM sequence: TTT
tttgagatggagtttcactc

SEQ ID NO: 410984 - DNA, 20 bp, Artificial Sequence
  Description of Artificial Sequence: Synthetic oligonucleotide
  Target: LAMA2; (+) strand; PAM type: YTN; PAM sequence: TTT
ttgagatggagtttcactct

SEQ ID NO: 410985 - DNA, 20 bp, Artificial Sequence
  Description of Artificial Sequence: Synthetic oligonucleotide
  Target: LAMA2; (+) strand; PAM type: YTN; PAM sequence: TTT
tgagatggagtttcactctt

SEQ ID NO: 410986 - DNA, 20 bp, Artificial Sequence
  Description of Artificial Sequence: Synthetic oligonucleotide
  Target: LAMA2; (+) strand; PAM type: YTN; PAM sequence: TTT
gagatggagtttcactcttg

SEQ ID NO: 410987 - DNA, 20 bp, Artificial Sequence
  Description of Artificial Sequence: Synthetic oligonucleotide
  Target: LAMA2; (+) strand; PAM type: YTN; PAM sequence: TTG
agatggagtttcactcttgc

SEQ ID NO: 410988 - DNA, 20 bp, Artificial Sequence
  Description of Artificial Sequence: Synthetic oligonucleotide
  Target: LAMA2; (+) strand; PAM type: YTN; PAM sequence: TTT
cactcttgctacccaggctg

SEQ ID NO: 410989 - DNA, 20 bp, Artificial Sequence
  Description of Artificial Sequence: Synthetic oligonucleotide
  Target: LAMA2; (+) strand; PAM type: YTN; PAM sequence: TTC
actcttgctacccaggctgg

SEQ ID NO: 410990 - DNA, 20 bp, Artificial Sequence
  Description of Artificial Sequence: Synthetic oligonucleotide
  Target: LAMA2; (+) strand; PAM type: YTN; PAM sequence: CTC
ttgctacccaggctggagtg

SEQ ID NO: 410991 - DNA, 20 bp, Artificial Sequence
  Description of Artificial Sequence: Synthetic oligonucleotide
  Target: LAMA2; (+) strand; PAM type: YTN; PAM sequence: CTT
gctacccaggctggagtgta

SEQ ID NO: 410992 - DNA, 20 bp, Artificial Sequence
  Description of Artificial Sequence: Synthetic oligonucleotide
  Target: LAMA2; (+) strand; PAM type: YTN; PAM sequence: TTG
ctacccaggctggagtgtaa

SEQ ID NO: 410993 - DNA, 20 bp, Artificial Sequence
  Description of Artificial Sequence: Synthetic oligonucleotide
  Target: LAMA2; (+) strand; PAM type: YTN; PAM sequence: CTA
cccaggctggagtgtaatgt

SEQ ID NO: 410994 - DNA, 20 bp, Artificial Sequence
  Description of Artificial Sequence: Synthetic oligonucleotide
  Target: LAMA2; (+) strand; PAM type: YTN; PAM sequence: CTG
gagtgtaatgtcacaatctc

SEQ ID NO: 410995 - DNA, 20 bp, Artificial Sequence
  Description of Artificial Sequence: Synthetic oligonucleotide
  Target: LAMA2; (+) strand; PAM type: YTN; PAM sequence: CTC
gtctcactgcaacctccacc

SEQ ID NO: 410996 - DNA, 20 bp, Artificial Sequence
  Description of Artificial Sequence: Synthetic oligonucleotide
  Target: LAMA2; (+) strand; PAM type: YTN; PAM sequence: CTC
actgcaacctccacctcctg

SEQ ID NO: 410997 - DNA, 20 bp, Artificial Sequence
  Description of Artificial Sequence: Synthetic oligonucleotide
  Target: LAMA2; (+) strand; PAM type: YTN; PAM sequence: CTG
caacctccacctcctgggtt

SEQ ID NO: 410998 - DNA, 20 bp, Artificial Sequence
  Description of Artificial Sequence: Synthetic oligonucleotide
  Target: LAMA2; (+) strand; PAM type: YTN; PAM sequence: CTC
cacctcctgggttcaagcaa

SEQ ID NO: 410999 - DNA, 20 bp, Artificial Sequence
  Description of Artificial Sequence: Synthetic oligonucleotide
  Target: LAMA2; (+) strand; PAM type: YTN; PAM sequence: CTC
ctgggttcaagcaattctcc

SEQ ID NO: 411000 - DNA, 20 bp, Artificial Sequence
  Description of Artificial Sequence: Synthetic oligonucleotide
  Target: LAMA2; (+) strand; PAM type: YTN; PAM sequence: CTG
ggttcaagcaattctcctgc

SEQ ID NO: 411001 - DNA, 20 bp, Artificial Sequence
  Description of Artificial Sequence: Synthetic oligonucleotide
  Target: LAMA2; (+) strand; PAM type: YTN; PAM sequence: TTC
aagcaattctcctgcttcag

SEQ ID NO: 411002 - DNA, 20 bp, Artificial Sequence
  Description of Artificial Sequence: Synthetic oligonucleotide
  Target: LAMA2; (+) strand; PAM type: YTN; PAM sequence: TTC
tcctgcttcagcctcccgag

SEQ ID NO: 411003 - DNA, 20 bp, Artificial Sequence
  Description of Artificial Sequence: Synthetic oligonucleotide
  Target: LAMA2; (+) strand; PAM type: YTN; PAM sequence: CTC
ctgcttcagcctcccgagta

SEQ ID NO: 411004 - DNA, 20 bp, Artificial Sequence
  Description of Artificial Sequence: Synthetic oligonucleotide
  Target: LAMA2; (+) strand; PAM type: YTN; PAM sequence: CTG
cttcagcctcccgagtagct

SEQ ID NO: 411005 - DNA, 20 bp, Artificial Sequence
  Description of Artificial Sequence: Synthetic oligonucleotide
  Target: LAMA2; (+) strand; PAM type: YTN; PAM sequence: CTT
cagcctcccgagtagctggg

SEQ ID NO: 411006 - DNA, 20 bp, Artificial Sequence
  Description of Artificial Sequence: Synthetic oligonucleotide
  Target: LAMA2; (+) strand; PAM type: YTN; PAM sequence: TTC
agcctcccgagtagctggga

SEQ ID NO: 411007 - DNA, 20 bp, Artificial Sequence
  Description of Artificial Sequence: Synthetic oligonucleotide
  Target: LAMA2; (+) strand; PAM type: YTN; PAM sequence: CTC
ccgagtagctgggattacgg

SEQ ID NO: 411008 - DNA, 20 bp, Artificial Sequence
  Description of Artificial Sequence: Synthetic oligonucleotide
  Target: LAMA2; (+) strand; PAM type: YTN; PAM sequence: CTG
ggattacgggcatgcaccac

SEQ ID NO: 411009 - DNA, 20 bp, Artificial Sequence
  Description of Artificial Sequence: Synthetic oligonucleotide
  Target: LAMA2; (+) strand; PAM type: YTN; PAM sequence: TTA
cgggcatgcaccaccactct

SEQ ID NO: 411010 - DNA, 20 bp, Artificial Sequence
  Description of Artificial Sequence: Synthetic oligonucleotide
  Target: LAMA2; (+) strand; PAM type: YTN; PAM sequence: CTC
ttggctaattttgtattttt

SEQ ID NO: 411011 - DNA, 20 bp, Artificial Sequence
  Description of Artificial Sequence: Synthetic oligonucleotide
  Target: LAMA2; (+) strand; PAM type: YTN; PAM sequence: CTT
ggctaattttgtatttttag

SEQ ID NO: 411012 - DNA, 20 bp, Artificial Sequence
  Description of Artificial Sequence: Synthetic oligonucleotide
  Target: LAMA2; (+) strand; PAM type: YTN; PAM sequence: TTG
gctaattttgtatttttagt

SEQ ID NO: 411013 - DNA, 20 bp, Artificial Sequence
  Description of Artificial Sequence: Synthetic oligonucleotide
  Target: LAMA2; (+) strand; PAM type: YTN; PAM sequence: CTA
attttgtatttttagtagag

SEQ ID NO: 411014 - DNA, 20 bp, Artificial Sequence
  Description of Artificial Sequence: Synthetic oligonucleotide
  Target: LAMA2; (+) strand; PAM type: YTN; PAM sequence: TTT
tgtatttttagtagagacgg

SEQ ID NO: 411015 - DNA, 20 bp, Artificial Sequence
  Description of Artificial Sequence: Synthetic oligonucleotide
  Target: LAMA2; (+) strand; PAM type: YTN; PAM sequence: TTT
gtatttttagtagagacggg

SEQ ID NO: 411016 - DNA, 20 bp, Artificial Sequence
  Description of Artificial Sequence: Synthetic oligonucleotide
  Target: LAMA2; (+) strand; PAM type: YTN; PAM sequence: TTG
tatttttagtagagacggga

SEQ ID NO: 411017 - DNA, 20 bp, Artificial Sequence
  Description of Artificial Sequence: Synthetic oligonucleotide
  Target: LAMA2; (+) strand; PAM type: YTN; PAM sequence: TTT
ttagtagagacgggatttct

SEQ ID NO: 411018 - DNA, 20 bp, Artificial Sequence
  Description of Artificial Sequence: Synthetic oligonucleotide
  Target: LAMA2; (+) strand; PAM type: YTN; PAM sequence: TTT
tagtagagacgggatttctc

SEQ ID NO: 411019 - DNA, 20 bp, Artificial Sequence
  Description of Artificial Sequence: Synthetic oligonucleotide
  Target: LAMA2; (+) strand; PAM type: YTN; PAM sequence: TTT
agtagagacgggatttctcc

SEQ ID NO: 411020 - DNA, 20 bp, Artificial Sequence
  Description of Artificial Sequence: Synthetic oligonucleotide
  Target: LAMA2; (+) strand; PAM type: YTN; PAM sequence: TTA
gtagagacgggatttctcca

SEQ ID NO: 411021 - DNA, 20 bp, Artificial Sequence
  Description of Artificial Sequence: Synthetic oligonucleotide
  Target: LAMA2; (+) strand; PAM type: YTN; PAM sequence: TTT
ctccatgttggtcaggctgg

SEQ ID NO: 411022 - DNA, 20 bp, Artificial Sequence
  Description of Artificial Sequence: Synthetic oligonucleotide
  Target: LAMA2; (+) strand; PAM type: YTN; PAM sequence: TTC
tccatgttggtcaggctggt

SEQ ID NO: 411023 - DNA, 20 bp, Artificial Sequence
  Description of Artificial Sequence: Synthetic oligonucleotide
  Target: LAMA2; (+) strand; PAM type: YTN; PAM sequence: CTC
catgttggtcaggctggtct

SEQ ID NO: 411024 - DNA, 20 bp, Artificial Sequence
  Description of Artificial Sequence: Synthetic oligonucleotide
  Target: LAMA2; (+) strand; PAM type: YTN; PAM sequence: TTG
gtcaggctggtctcgaactg

SEQ ID NO: 411025 - DNA, 20 bp, Artificial Sequence
  Description of Artificial Sequence: Synthetic oligonucleotide
  Target: LAMA2; (+) strand; PAM type: YTN; PAM sequence: CTG
gtctcgaactgccaacttca

SEQ ID NO: 411026 - DNA, 20 bp, Artificial Sequence
  Description of Artificial Sequence: Synthetic oligonucleotide
  Target: LAMA2; (+) strand; PAM type: YTN; PAM sequence: CTC
gaactgccaacttcaggtgg

SEQ ID NO: 411027 - DNA, 20 bp, Artificial Sequence
  Description of Artificial Sequence: Synthetic oligonucleotide
  Target: LAMA2; (+) strand; PAM type: YTN; PAM sequence: CTG
ccaacttcaggtggtctgcc

SEQ ID NO: 411028 - DNA, 20 bp, Artificial Sequence
  Description of Artificial Sequence: Synthetic oligonucleotide
  Target: LAMA2; (+) strand; PAM type: YTN; PAM sequence: CTT
caggtggtctgcccacctca

SEQ ID NO: 411029 - DNA, 20 bp, Artificial Sequence
  Description of Artificial Sequence: Synthetic oligonucleotide
  Target: LAMA2; (+) strand; PAM type: YTN; PAM sequence: TTC
aggtggtctgcccacctcag

SEQ ID NO: 411030 - DNA, 20 bp, Artificial Sequence
  Description of Artificial Sequence: Synthetic oligonucleotide
  Target: LAMA2; (+) strand; PAM type: YTN; PAM sequence: CTG
cccacctcagcctcccaaag

SEQ ID NO: 411031 - DNA, 20 bp, Artificial Sequence
  Description of Artificial Sequence: Synthetic oligonucleotide
  Target: LAMA2; (+) strand; PAM type: YTN; PAM sequence: CTC
agcctcccaaagtgctggga

SEQ ID NO: 411032 - DNA, 20 bp, Artificial Sequence
  Description of Artificial Sequence: Synthetic oligonucleotide
  Target: LAMA2; (+) strand; PAM type: YTN; PAM sequence: CTC
ccaaagtgctgggattacag

SEQ ID NO: 411033 - DNA, 20 bp, Artificial Sequence
  Description of Artificial Sequence: Synthetic oligonucleotide
  Target: LAMA2; (+) strand; PAM type: YTN; PAM sequence: CTG
ggattacaggcatgagacac

SEQ ID NO: 411034 - DNA, 20 bp, Artificial Sequence
  Description of Artificial Sequence: Synthetic oligonucleotide
  Target: LAMA2; (+) strand; PAM type: YTN; PAM sequence: TTA
caggcatgagacactgcgcc

SEQ ID NO: 411035 - DNA, 20 bp, Artificial Sequence
  Description of Artificial Sequence: Synthetic oligonucleotide
  Target: LAMA2; (+) strand; PAM type: YTN; PAM sequence: CTG
cgcccggcctatttcccctt

SEQ ID NO: 411036 - DNA, 20 bp, Artificial Sequence
  Description of Artificial Sequence: Synthetic oligonucleotide
  Target: LAMA2; (+) strand; PAM type: YTN; PAM sequence: CTA
tttccccttcttttgcacat

SEQ ID NO: 411037 - DNA, 20 bp, Artificial Sequence
  Description of Artificial Sequence: Synthetic oligonucleotide
  Target: LAMA2; (+) strand; PAM type: YTN; PAM sequence: TTT
ccccttcttttgcacattat

SEQ ID NO: 411038 - DNA, 20 bp, Artificial Sequence
  Description of Artificial Sequence: Synthetic oligonucleotide
  Target: LAMA2; (+) strand; PAM type: YTN; PAM sequence: TTC
cccttcttttgcacattata

SEQ ID NO: 411039 - DNA, 20 bp, Artificial Sequence
  Description of Artificial Sequence: Synthetic oligonucleotide
  Target: LAMA2; (+) strand; PAM type: YTN; PAM sequence: CTT
cttttgcacattataattag

SEQ ID NO: 411040 - DNA, 20 bp, Artificial Sequence
  Description of Artificial Sequence: Synthetic oligonucleotide
  Target: LAMA2; (+) strand; PAM type: YTN; PAM sequence: TTC
ttttgcacattataattagt

SEQ ID NO: 411041 - DNA, 20 bp, Artificial Sequence
  Description of Artificial Sequence: Synthetic oligonucleotide
  Target: LAMA2; (+) strand; PAM type: YTN; PAM sequence: CTT
ttgcacattataattagtta

SEQ ID NO: 411042 - DNA, 20 bp, Artificial Sequence
  Description of Artificial Sequence: Synthetic oligonucleotide
  Target: LAMA2; (+) strand; PAM type: YTN; PAM sequence: TTT
tgcacattataattagttat

SEQ ID NO: 411043 - DNA, 20 bp, Artificial Sequence
  Description of Artificial Sequence: Synthetic oligonucleotide
  Target: LAMA2; (+) strand; PAM type: YTN; PAM sequence: TTT
gcacattataattagttatg

SEQ ID NO: 411044 - DNA, 20 bp, Artificial Sequence
  Description of Artificial Sequence: Synthetic oligonucleotide
  Target: LAMA2; (+) strand; PAM type: YTN; PAM sequence: TTG
cacattataattagttatga

SEQ ID NO: 411045 - DNA, 20 bp, Artificial Sequence
  Description of Artificial Sequence: Synthetic oligonucleotide
  Target: LAMA2; (+) strand; PAM type: YTN; PAM sequence: TTA
taattagttatgactgtgtg

SEQ ID NO: 411046 - DNA, 20 bp, Artificial Sequence
  Description of Artificial Sequence: Synthetic oligonucleotide
  Target: LAMA2; (+) strand; PAM type: YTN; PAM sequence: TTA
gttatgactgtgtggtcaga

SEQ ID NO: 411047 - DNA, 20 bp, Artificial Sequence
  Description of Artificial Sequence: Synthetic oligonucleotide
  Target: LAMA2; (+) strand; PAM type: YTN; PAM sequence: TTA
tgactgtgtggtcagaatta

SEQ ID NO: 411048 - DNA, 20 bp, Artificial Sequence
  Description of Artificial Sequence: Synthetic oligonucleotide
  Target: LAMA2; (+) strand; PAM type: YTN; PAM sequence: CTG
tgtggtcagaattagatttt

SEQ ID NO: 411049 - DNA, 20 bp, Artificial Sequence
  Description of Artificial Sequence: Synthetic oligonucleotide
  Target: LAMA2; (+) strand; PAM type: YTN; PAM sequence: TTA
gattttttagaactttccat

SEQ ID NO: 411050 - DNA, 20 bp, Artificial Sequence
  Description of Artificial Sequence: Synthetic oligonucleotide
  Target: LAMA2; (+) strand; PAM type: YTN; PAM sequence: TTT
tttagaactttccatctcta

SEQ ID NO: 411051 - DNA, 20 bp, Artificial Sequence
  Description of Artificial Sequence: Synthetic oligonucleotide
  Target: LAMA2; (+) strand; PAM type: YTN; PAM sequence: TTT
ttagaactttccatctctat

SEQ ID NO: 411052 - DNA, 20 bp, Artificial Sequence
  Description of Artificial Sequence: Synthetic oligonucleotide
  Target: LAMA2; (+) strand; PAM type: YTN; PAM sequence: TTT
tagaactttccatctctatt

SEQ ID NO: 411053 - DNA, 20 bp, Artificial Sequence
  Description of Artificial Sequence: Synthetic oligonucleotide
  Target: LAMA2; (+) strand; PAM type: YTN; PAM sequence: TTT
agaactttccatctctatta

SEQ ID NO: 411054 - DNA, 20 bp, Artificial Sequence
  Description of Artificial Sequence: Synthetic oligonucleotide
  Target: LAMA2; (+) strand; PAM type: YTN; PAM sequence: TTA
gaactttccatctctattaa

SEQ ID NO: 411055 - DNA, 20 bp, Artificial Sequence
  Description of Artificial Sequence: Synthetic oligonucleotide
  Target: LAMA2; (+) strand; PAM type: YTN; PAM sequence: CTT
tccatctctattaattgtat

SEQ ID NO: 411056 - DNA, 20 bp, Artificial Sequence
  Description of Artificial Sequence: Synthetic oligonucleotide
  Target: LAMA2; (+) strand; PAM type: YTN; PAM sequence: TTT
ccatctctattaattgtatt

SEQ ID NO: 411057 - DNA, 20 bp, Artificial Sequence
  Description of Artificial Sequence: Synthetic oligonucleotide
  Target: LAMA2; (+) strand; PAM type: YTN; PAM sequence: TTC
catctctattaattgtatta

SEQ ID NO: 411058 - DNA, 20 bp, Artificial Sequence
  Description of Artificial Sequence: Synthetic oligonucleotide
  Target: LAMA2; (+) strand; PAM type: YTN; PAM sequence: CTC
tattaattgtattatatttt

SEQ ID NO: 411059 - DNA, 20 bp, Artificial Sequence
  Description of Artificial Sequence: Synthetic oligonucleotide
  Target: LAMA2; (+) strand; PAM type: YTN; PAM sequence: CTA
ttaattgtattatattttag

SEQ ID NO: 411060 - DNA, 20 bp, Artificial Sequence
  Description of Artificial Sequence: Synthetic oligonucleotide
  Target: LAMA2; (+) strand; PAM type: YTN; PAM sequence: TTA
attgtattatattttagaaa

SEQ ID NO: 411061 - DNA, 20 bp, Artificial Sequence
  Description of Artificial Sequence: Synthetic oligonucleotide
  Target: LAMA2; (+) strand; PAM type: YTN; PAM sequence: TTG
tattatattttagaaatcag

SEQ ID NO: 411062 - DNA, 20 bp, Artificial Sequence
  Description of Artificial Sequence: Synthetic oligonucleotide
  Target: LAMA2; (+) strand; PAM type: YTN; PAM sequence: TTA
tattttagaaatcagatcat

SEQ ID NO: 411063 - DNA, 20 bp, Artificial Sequence
  Description of Artificial Sequence: Synthetic oligonucleotide
  Target: LAMA2; (+) strand; PAM type: YTN; PAM sequence: TTT
tagaaatcagatcatgaagc

SEQ ID NO: 411064 - DNA, 20 bp, Artificial Sequence
  Description of Artificial Sequence: Synthetic oligonucleotide
  Target: LAMA2; (+) strand; PAM type: YTN; PAM sequence: TTT
agaaatcagatcatgaagcc

SEQ ID NO: 411065 - DNA, 20 bp, Artificial Sequence
  Description of Artificial Sequence: Synthetic oligonucleotide
  Target: LAMA2; (+) strand; PAM type: YTN; PAM sequence: TTA
gaaatcagatcatgaagcca

SEQ ID NO: 411066 - DNA, 20 bp, Artificial Sequence
  Description of Artificial Sequence: Synthetic oligonucleotide
  Target: LAMA2; (+) strand; PAM type: YTN; PAM sequence: CTT
ctgttttaatttgtttcctt

SEQ ID NO: 411067 - DNA, 20 bp, Artificial Sequence
  Description of Artificial Sequence: Synthetic oligonucleotide
  Target: LAMA2; (+) strand; PAM type: YTN; PAM sequence: TTC
tgttttaatttgtttccttt

SEQ ID NO: 411068 - DNA, 20 bp, Artificial Sequence
  Description of Artificial Sequence: Synthetic oligonucleotide
  Target: LAMA2; (+) strand; PAM type: YTN; PAM sequence: CTG
ttttaatttgtttcctttct

SEQ ID NO: 411069 - DNA, 20 bp, Artificial Sequence
  Description of Artificial Sequence: Synthetic oligonucleotide
  Target: LAMA2; (+) strand; PAM type: YTN; PAM sequence: TTT
taatttgtttcctttcttat

SEQ ID NO: 411070 - DNA, 20 bp, Artificial Sequence
  Description of Artificial Sequence: Synthetic oligonucleotide
  Target: LAMA2; (+) strand; PAM type: YTN; PAM sequence: TTT
aatttgtttcctttcttatg

SEQ ID NO: 411071 - DNA, 20 bp, Artificial Sequence
  Description of Artificial Sequence: Synthetic oligonucleotide
  Target: LAMA2; (+) strand; PAM type: YTN; PAM sequence: TTA
atttgtttcctttcttatgt

SEQ ID NO: 411072 - DNA, 20 bp, Artificial Sequence
  Description of Artificial Sequence: Synthetic oligonucleotide
  Target: LAMA2; (+) strand; PAM type: YTN; PAM sequence: TTT
gtttcctttcttatgttctt

SEQ ID NO: 411073 - DNA, 20 bp, Artificial Sequence
  Description of Artificial Sequence: Synthetic oligonucleotide
  Target: LAMA2; (+) strand; PAM type: YTN; PAM sequence: TTG
tttcctttcttatgttcttt

SEQ ID NO: 411074 - DNA, 20 bp, Artificial Sequence
  Description of Artificial Sequence: Synthetic oligonucleotide
  Target: LAMA2; (+) strand; PAM type: YTN; PAM sequence: TTT
cctttcttatgttctttttg

SEQ ID NO: 411075 - DNA, 20 bp, Artificial Sequence
  Description of Artificial Sequence: Synthetic oligonucleotide
  Target: LAMA2; (+) strand; PAM type: YTN; PAM sequence: TTC
ctttcttatgttctttttgt

SEQ ID NO: 411076 - DNA, 20 bp, Artificial Sequence
  Description of Artificial Sequence: Synthetic oligonucleotide
  Target: LAMA2; (+) strand; PAM type: YTN; PAM sequence: CTT
tcttatgttctttttgtgtg

SEQ ID NO: 411077 - DNA, 20 bp, Artificial Sequence
  Description of Artificial Sequence: Synthetic oligonucleotide
  Target: LAMA2; (+) strand; PAM type: YTN; PAM sequence: TTT
cttatgttctttttgtgtgt

SEQ ID NO: 411078 - DNA, 20 bp, Artificial Sequence
  Description of Artificial Sequence: Synthetic oligonucleotide
  Target: LAMA2; (+) strand; PAM type: YTN; PAM sequence: TTC
ttatgttctttttgtgtgtg

SEQ ID NO: 411079 - DNA, 20 bp, Artificial Sequence
  Description of Artificial Sequence: Synthetic oligonucleotide
  Target: LAMA2; (+) strand; PAM type: YTN; PAM sequence: CTT
atgttctttttgtgtgtgta

SEQ ID NO: 411080 - DNA, 20 bp, Artificial Sequence
  Description of Artificial Sequence: Synthetic oligonucleotide
  Target: LAMA2; (+) strand; PAM type: YTN; PAM sequence: TTA
tgttctttttgtgtgtgtag

SEQ ID NO: 411081 - DNA, 20 bp, Artificial Sequence
  Description of Artificial Sequence: Synthetic oligonucleotide
  Target: LAMA2; (+) strand; PAM type: YTN; PAM sequence: TTC
tttttgtgtgtgtaggggga

SEQ ID NO: 411082 - DNA, 20 bp, Artificial Sequence
  Description of Artificial Sequence: Synthetic oligonucleotide
  Target: LAMA2; (+) strand; PAM type: YTN; PAM sequence: CTT
tttgtgtgtgtagggggaaa

SEQ ID NO: 411083 - DNA, 20 bp, Artificial Sequence
  Description of Artificial Sequence: Synthetic oligonucleotide
  Target: LAMA2; (+) strand; PAM type: YTN; PAM sequence: TTT
ttgtgtgtgtagggggaaaa

SEQ ID NO: 411084 - DNA, 20 bp, Artificial Sequence
  Description of Artificial Sequence: Synthetic oligonucleotide
  Target: LAMA2; (+) strand; PAM type: YTN; PAM sequence: TTT
tgtgtgtgtagggggaaaag

SEQ ID NO: 411085 - DNA, 20 bp, Artificial Sequence
  Description of Artificial Sequence: Synthetic oligonucleotide
  Target: LAMA2; (+) strand; PAM type: YTN; PAM sequence: TTT
gtgtgtgtagggggaaaagg

SEQ ID NO: 411086 - DNA, 20 bp, Artificial Sequence
  Description of Artificial Sequence: Synthetic oligonucleotide
  Target: LAMA2; (+) strand; PAM type: YTN; PAM sequence: TTG
tgtgtgtagggggaaaaggg

SEQ ID NO: 411087 - DNA, 20 bp, Artificial Sequence
  Description of Artificial Sequence: Synthetic oligonucleotide
  Target: LAMA2; (+) strand; PAM type: YTN; PAM sequence: CTT
ctttttaaaggttactaaaa

SEQ ID NO: 411088 - DNA, 20 bp, Artificial Sequence
  Description of Artificial Sequence: Synthetic oligonucleotide
  Target: LAMA2; (+) strand; PAM type: YTN; PAM sequence: TTC
tttttaaaggttactaaaag

SEQ ID NO: 411089 - DNA, 20 bp, Artificial Sequence
  Description of Artificial Sequence: Synthetic oligonucleotide
  Target: LAMA2; (+) strand; PAM type: YTN; PAM sequence: CTT
tttaaaggttactaaaagtt

SEQ ID NO: 411090 - DNA, 20 bp, Artificial Sequence
  Description of Artificial Sequence: Synthetic oligonucleotide
  Target: LAMA2; (+) strand; PAM type: YTN; PAM sequence: TTT
ttaaaggttactaaaagtta

SEQ ID NO: 411091 - DNA, 20 bp, Artificial Sequence
  Description of Artificial Sequence: Synthetic oligonucleotide
  Target: LAMA2; (+) strand; PAM type: YTN; PAM sequence: TTT
taaaggttactaaaagttaa

SEQ ID NO: 411092 - DNA, 20 bp, Artificial Sequence
  Description of Artificial Sequence: Synthetic oligonucleotide
  Target: LAMA2; (+) strand; PAM type: YTN; PAM sequence: TTT
aaaggttactaaaagttaaa

SEQ ID NO: 411093 - DNA, 20 bp, Artificial Sequence
  Description of Artificial Sequence: Synthetic oligonucleotide
  Target: LAMA2; (+) strand; PAM type: YTN; PAM sequence: TTA
aaggttactaaaagttaaaa

SEQ ID NO: 411094 - DNA, 20 bp, Artificial Sequence
  Description of Artificial Sequence: Synthetic oligonucleotide
  Target: LAMA2; (+) strand; PAM type: YTN; PAM sequence: TTA
ctaaaagttaaaagttttac

SEQ ID NO: 411095 - DNA, 20 bp, Artificial Sequence
  Description of Artificial Sequence: Synthetic oligonucleotide
  Target: LAMA2; (+) strand; PAM type: YTN; PAM sequence: CTA
aaagttaaaagttttacagt

SEQ ID NO: 411096 - DNA, 20 bp, Artificial Sequence
  Description of Artificial Sequence: Synthetic oligonucleotide
  Target: LAMA2; (+) strand; PAM type: YTN; PAM sequence: TTA
aaagttttacagtttatttt

SEQ ID NO: 411097 - DNA, 20 bp, Artificial Sequence
  Description of Artificial Sequence: Synthetic oligonucleotide
  Target: LAMA2; (+) strand; PAM type: YTN; PAM sequence: TTT
tacagtttattttgtaacaa

SEQ ID NO: 411098 - DNA, 20 bp, Artificial Sequence
  Description of Artificial Sequence: Synthetic oligonucleotide
  Target: LAMA2; (+) strand; PAM type: YTN; PAM sequence: TTT
acagtttattttgtaacaaa

SEQ ID NO: 411099 - DNA, 20 bp, Artificial Sequence
  Description of Artificial Sequence: Synthetic oligonucleotide
  Target: LAMA2; (+) strand; PAM type: YTN; PAM sequence: TTA
cagtttattttgtaacaaat

SEQ ID NO: 411100 - DNA, 20 bp, Artificial Sequence
  Description of Artificial Sequence: Synthetic oligonucleotide
  Target: LAMA2; (+) strand; PAM type: YTN; PAM sequence: TTT
attttgtaacaaatatttat

SEQ ID NO: 411101 - DNA, 20 bp, Artificial Sequence
  Description of Artificial Sequence: Synthetic oligonucleotide
  Target: LAMA2; (+) strand; PAM type: YTN; PAM sequence: TTA
ttttgtaacaaatatttatt

SEQ ID NO: 411102 - DNA, 20 bp, Artificial Sequence
  Description of Artificial Sequence: Synthetic oligonucleotide
  Target: LAMA2; (+) strand; PAM type: YTN; PAM sequence: TTT
tgtaacaaatatttattaag

SEQ ID NO: 411103 - DNA, 20 bp, Artificial Sequence
  Description of Artificial Sequence: Synthetic oligonucleotide
  Target: LAMA2; (+) strand; PAM type: YTN; PAM sequence: TTT
gtaacaaatatttattaagc

SEQ ID NO: 411104 - DNA, 20 bp, Artificial Sequence
  Description of Artificial Sequence: Synthetic oligonucleotide
  Target: LAMA2; (+) strand; PAM type: YTN; PAM sequence: TTG
taacaaatatttattaagca

SEQ ID NO: 411105 - DNA, 20 bp, Artificial Sequence
  Description of Artificial Sequence: Synthetic oligonucleotide
  Target: LAMA2; (+) strand; PAM type: YTN; PAM sequence: TTT
attaagcacctactaagtgc

SEQ ID NO: 411106 - DNA, 20 bp, Artificial Sequence
  Description of Artificial Sequence: Synthetic oligonucleotide
  Target: LAMA2; (+) strand; PAM type: YTN; PAM sequence: TTA
ttaagcacctactaagtgca

SEQ ID NO: 411107 - DNA, 20 bp, Artificial Sequence
  Description of Artificial Sequence: Synthetic oligonucleotide
  Target: LAMA2; (+) strand; PAM type: YTN; PAM sequence: TTA
agcacctactaagtgcaaag

SEQ ID NO: 411108 - DNA, 20 bp, Artificial Sequence
  Description of Artificial Sequence: Synthetic oligonucleotide
  Target: LAMA2; (+) strand; PAM type: YTN; PAM sequence: CTA
ctaagtgcaaagatgaatac

SEQ ID NO: 411109 - DNA, 20 bp, Artificial Sequence
  Description of Artificial Sequence: Synthetic oligonucleotide
  Target: LAMA2; (+) strand; PAM type: YTN; PAM sequence: CTA
agtgcaaagatgaatacgat

SEQ ID NO: 411110 - DNA, 20 bp, Artificial Sequence
  Description of Artificial Sequence: Synthetic oligonucleotide
  Target: LAMA2; (+) strand; PAM type: YTN; PAM sequence: TTA
tcattgctagtcagagaaaa

SEQ ID NO: 411111 - DNA, 20 bp, Artificial Sequence
  Description of Artificial Sequence: Synthetic oligonucleotide
  Target: LAMA2; (+) strand; PAM type: YTN; PAM sequence: TTG
ctagtcagagaaaaagaggg

SEQ ID NO: 411112 - DNA, 20 bp, Artificial Sequence
  Description of Artificial Sequence: Synthetic oligonucleotide
  Target: LAMA2; (+) strand; PAM type: YTN; PAM sequence: CTA
gtcagagaaaaagagggaga

SEQ ID NO: 411113 - DNA, 20 bp, Artificial Sequence
  Description of Artificial Sequence: Synthetic oligonucleotide
  Target: LAMA2; (+) strand; PAM type: YTN; PAM sequence: TTG
ctttttctgccatagccctc

SEQ ID NO: 411114 - DNA, 20 bp, Artificial Sequence
  Description of Artificial Sequence: Synthetic oligonucleotide
  Target: LAMA2; (+) strand; PAM type: YTN; PAM sequence: CTT
tttctgccatagccctccca

SEQ ID NO: 411115 - DNA, 20 bp, Artificial Sequence
  Description of Artificial Sequence: Synthetic oligonucleotide
  Target: LAMA2; (+) strand; PAM type: YTN; PAM sequence: TTT
ttctgccatagccctcccac

SEQ ID NO: 411116 - DNA, 20 bp, Artificial Sequence
  Description of Artificial Sequence: Synthetic oligonucleotide
  Target: LAMA2; (+) strand; PAM type: YTN; PAM sequence: TTT
tctgccatagccctcccact

SEQ ID NO: 411117 - DNA, 20 bp, Artificial Sequence
  Description of Artificial Sequence: Synthetic oligonucleotide
  Target: LAMA2; (+) strand; PAM type: YTN; PAM sequence: TTT
ctgccatagccctcccactt

SEQ ID NO: 411118 - DNA, 20 bp, Artificial Sequence
  Description of Artificial Sequence: Synthetic oligonucleotide
  Target: LAMA2; (+) strand; PAM type: YTN; PAM sequence: TTC
tgccatagccctcccacttt

SEQ ID NO: 411119 - DNA, 20 bp, Artificial Sequence
  Description of Artificial Sequence: Synthetic oligonucleotide
  Target: LAMA2; (+) strand; PAM type: YTN; PAM sequence: CTG
ccatagccctcccactttta

SEQ ID NO: 411120 - DNA, 20 bp, Artificial Sequence
  Description of Artificial Sequence: Synthetic oligonucleotide
  Target: LAMA2; (+) strand; PAM type: YTN; PAM sequence: CTC
ccacttttattccatgaatt

SEQ ID NO: 411121 - DNA, 20 bp, Artificial Sequence
  Description of Artificial Sequence: Synthetic oligonucleotide
  Target: LAMA2; (+) strand; PAM type: YTN; PAM sequence: CTT
ttattccatgaattctggca

SEQ ID NO: 411122 - DNA, 20 bp, Artificial Sequence
  Description of Artificial Sequence: Synthetic oligonucleotide
  Target: LAMA2; (+) strand; PAM type: YTN; PAM sequence: TTT
tattccatgaattctggcag

SEQ ID NO: 411123 - DNA, 20 bp, Artificial Sequence
  Description of Artificial Sequence: Synthetic oligonucleotide
  Target: LAMA2; (+) strand; PAM type: YTN; PAM sequence: TTT
attccatgaattctggcagg

SEQ ID NO: 411124 - DNA, 20 bp, Artificial Sequence
  Description of Artificial Sequence: Synthetic oligonucleotide
  Target: LAMA2; (+) strand; PAM type: YTN; PAM sequence: TTA
ttccatgaattctggcaggt

SEQ ID NO: 411125 - DNA, 20 bp, Artificial Sequence
  Description of Artificial Sequence: Synthetic oligonucleotide
  Target: LAMA2; (+) strand; PAM type: YTN; PAM sequence: TTC
catgaattctggcaggttac

SEQ ID NO: 411126 - DNA, 20 bp, Artificial Sequence
  Description of Artificial Sequence: Synthetic oligonucleotide
  Target: LAMA2; (+) strand; PAM type: YTN; PAM sequence: TTC
tggcaggttacttgtccctt

SEQ ID NO: 411127 - DNA, 20 bp, Artificial Sequence
  Description of Artificial Sequence: Synthetic oligonucleotide
  Target: LAMA2; (+) strand; PAM type: YTN; PAM sequence: CTG
gcaggttacttgtcccttct

SEQ ID NO: 411128 - DNA, 20 bp, Artificial Sequence
  Description of Artificial Sequence: Synthetic oligonucleotide
  Target: LAMA2; (+) strand; PAM type: YTN; PAM sequence: TTA
cttgtcccttctaaatgtaa

SEQ ID NO: 411129 - DNA, 20 bp, Artificial Sequence
  Description of Artificial Sequence: Synthetic oligonucleotide
  Target: LAMA2; (+) strand; PAM type: YTN; PAM sequence: CTT
gtcccttctaaatgtaaaat

SEQ ID NO: 411130 - DNA, 20 bp, Artificial Sequence
  Description of Artificial Sequence: Synthetic oligonucleotide
  Target: LAMA2; (+) strand; PAM type: YTN; PAM sequence: TTG
tcccttctaaatgtaaaata

SEQ ID NO: 411131 - DNA, 20 bp, Artificial Sequence
  Description of Artificial Sequence: Synthetic oligonucleotide
  Target: LAMA2; (+) strand; PAM type: YTN; PAM sequence: CTT
ctaaatgtaaaataattaat

SEQ ID NO: 411132 - DNA, 20 bp, Artificial Sequence
  Description of Artificial Sequence: Synthetic oligonucleotide
  Target: LAMA2; (+) strand; PAM type: YTN; PAM sequence: TTC
taaatgtaaaataattaatg

SEQ ID NO: 411133 - DNA, 20 bp, Artificial Sequence
  Description of Artificial Sequence: Synthetic oligonucleotide
  Target: LAMA2; (+) strand; PAM type: YTN; PAM sequence: CTA
aatgtaaaataattaatgga

SEQ ID NO: 411134 - DNA, 20 bp, Artificial Sequence
  Description of Artificial Sequence: Synthetic oligonucleotide
  Target: LAMA2; (+) strand; PAM type: YTN; PAM sequence: TTA
atggacaaataaggataata

SEQ ID NO: 411135 - DNA, 20 bp, Artificial Sequence
  Description of Artificial Sequence: Synthetic oligonucleotide
  Target: LAMA2; (+) strand; PAM type: YTN; PAM sequence: CTT
ccttctaggattactattat

SEQ ID NO: 411136 - DNA, 20 bp, Artificial Sequence
  Description of Artificial Sequence: Synthetic oligonucleotide
  Target: LAMA2; (+) strand; PAM type: YTN; PAM sequence: TTC
cttctaggattactattatg

SEQ ID NO: 411137 - DNA, 20 bp, Artificial Sequence
  Description of Artificial Sequence: Synthetic oligonucleotide
  Target: LAMA2; (+) strand; PAM type: YTN; PAM sequence: CTT
ctaggattactattatgagg

SEQ ID NO: 411138 - DNA, 20 bp, Artificial Sequence
  Description of Artificial Sequence: Synthetic oligonucleotide
  Target: LAMA2; (+) strand; PAM type: YTN; PAM sequence: TTC
taggattactattatgaggg

SEQ ID NO: 411139 - DNA, 20 bp, Artificial Sequence
  Description of Artificial Sequence: Synthetic oligonucleotide
  Target: LAMA2; (+) strand; PAM type: YTN; PAM sequence: CTA
ggattactattatgagggaa

SEQ ID NO: 411140 - DNA, 20 bp, Artificial Sequence
  Description of Artificial Sequence: Synthetic oligonucleotide
  Target: LAMA2; (+) strand; PAM type: YTN; PAM sequence: TTA
ctattatgagggaataagtt

SEQ ID NO: 411141 - DNA, 20 bp, Artificial Sequence
  Description of Artificial Sequence: Synthetic oligonucleotide
  Target: LAMA2; (+) strand; PAM type: YTN; PAM sequence: CTA
ttatgagggaataagttata

SEQ ID NO: 411142 - DNA, 20 bp, Artificial Sequence
  Description of Artificial Sequence: Synthetic oligonucleotide
  Target: LAMA2; (+) strand; PAM type: YTN; PAM sequence: TTA
tgagggaataagttatacat

SEQ ID NO: 411143 - DNA, 20 bp, Artificial Sequence
  Description of Artificial Sequence: Synthetic oligonucleotide
  Target: LAMA2; (+) strand; PAM type: YTN; PAM sequence: TTA
tacattttatgcaaagcacc

SEQ ID NO: 411144 - DNA, 20 bp, Artificial Sequence
  Description of Artificial Sequence: Synthetic oligonucleotide
  Target: LAMA2; (+) strand; PAM type: YTN; PAM sequence: TTT
tatgcaaagcacctagcacc

SEQ ID NO: 411145 - DNA, 20 bp, Artificial Sequence
  Description of Artificial Sequence: Synthetic oligonucleotide
  Target: LAMA2; (+) strand; PAM type: YTN; PAM sequence: TTT
atgcaaagcacctagcacca

SEQ ID NO: 411146 - DNA, 20 bp, Artificial Sequence
  Description of Artificial Sequence: Synthetic oligonucleotide
  Target: LAMA2; (+) strand; PAM type: YTN; PAM sequence: TTA
tgcaaagcacctagcaccat

SEQ ID NO: 411147 - DNA, 20 bp, Artificial Sequence
  Description of Artificial Sequence: Synthetic oligonucleotide
  Target: LAMA2; (+) strand; PAM type: YTN; PAM sequence: CTA
gcaccatgcttggctcaaag

SEQ ID NO: 411148 - DNA, 20 bp, Artificial Sequence
  Description of Artificial Sequence: Synthetic oligonucleotide
  Target: LAMA2; (+) strand; PAM type: YTN; PAM sequence: CTT
ggctcaaagtaacattccat

SEQ ID NO: 411149 - DNA, 20 bp, Artificial Sequence
  Description of Artificial Sequence: Synthetic oligonucleotide
  Target: LAMA2; (+) strand; PAM type: YTN; PAM sequence: TTG
gctcaaagtaacattccatc

SEQ ID NO: 411150 - DNA, 20 bp, Artificial Sequence
  Description of Artificial Sequence: Synthetic oligonucleotide
  Target: LAMA2; (+) strand; PAM type: YTN; PAM sequence: CTC
aaagtaacattccatctctc

SEQ ID NO: 411151 - DNA, 20 bp, Artificial Sequence
  Description of Artificial Sequence: Synthetic oligonucleotide
  Target: LAMA2; (+) strand; PAM type: YTN; PAM sequence: TTC
catctctctatttattcttt

SEQ ID NO: 411152 - DNA, 20 bp, Artificial Sequence
  Description of Artificial Sequence: Synthetic oligonucleotide
  Target: LAMA2; (+) strand; PAM type: YTN; PAM sequence: CTC
tctatttattcttttgttag

SEQ ID NO: 411153 - DNA, 20 bp, Artificial Sequence
  Description of Artificial Sequence: Synthetic oligonucleotide
  Target: LAMA2; (+) strand; PAM type: YTN; PAM sequence: CTC
tatttattcttttgttagtt

SEQ ID NO: 411154 - DNA, 20 bp, Artificial Sequence
  Description of Artificial Sequence: Synthetic oligonucleotide
  Target: LAMA2; (+) strand; PAM type: YTN; PAM sequence: CTA
tttattcttttgttagttta

SEQ ID NO: 411155 - DNA, 20 bp, Artificial Sequence
  Description of Artificial Sequence: Synthetic oligonucleotide
  Target: LAMA2; (+) strand; PAM type: YTN; PAM sequence: TTT
attcttttgttagtttaact

SEQ ID NO: 411156 - DNA, 20 bp, Artificial Sequence
  Description of Artificial Sequence: Synthetic oligonucleotide
  Target: LAMA2; (+) strand; PAM type: YTN; PAM sequence: TTA
ttcttttgttagtttaactt

SEQ ID NO: 411157 - DNA, 20 bp, Artificial Sequence
  Description of Artificial Sequence: Synthetic oligonucleotide
  Target: LAMA2; (+) strand; PAM type: YTN; PAM sequence: TTC
ttttgttagtttaactttaa

SEQ ID NO: 411158 - DNA, 20 bp, Artificial Sequence
  Description of Artificial Sequence: Synthetic oligonucleotide
  Target: LAMA2; (+) strand; PAM type: YTN; PAM sequence: CTT
ttgttagtttaactttaact

SEQ ID NO: 411159 - DNA, 20 bp, Artificial Sequence
  Description of Artificial Sequence: Synthetic oligonucleotide
  Target: LAMA2; (+) strand; PAM type: YTN; PAM sequence: TTT
tgttagtttaactttaactt

SEQ ID NO: 411160 - DNA, 20 bp, Artificial Sequence
  Description of Artificial Sequence: Synthetic oligonucleotide
  Target: LAMA2; (+) strand; PAM type: YTN; PAM sequence: TTT
gttagtttaactttaacttc

SEQ ID NO: 411161 - DNA, 20 bp, Artificial Sequence
  Description of Artificial Sequence: Synthetic oligonucleotide
  Target: LAMA2; (+) strand; PAM type: YTN; PAM sequence: TTG
ttagtttaactttaacttct

SEQ ID NO: 411162 - DNA, 20 bp, Artificial Sequence
  Description of Artificial Sequence: Synthetic oligonucleotide
  Target: LAMA2; (+) strand; PAM type: YTN; PAM sequence: TTA
gtttaactttaacttctgtg

SEQ ID NO: 411163 - DNA, 20 bp, Artificial Sequence
  Description of Artificial Sequence: Synthetic oligonucleotide
  Target: LAMA2; (+) strand; PAM type: YTN; PAM sequence: TTT
aactttaacttctgtgtttc

SEQ ID NO: 411164 - DNA, 20 bp, Artificial Sequence
  Description of Artificial Sequence: Synthetic oligonucleotide
  Target: LAMA2; (+) strand; PAM type: YTN; PAM sequence: TTA
actttaacttctgtgtttct

SEQ ID NO: 411165 - DNA, 20 bp, Artificial Sequence
  Description of Artificial Sequence: Synthetic oligonucleotide
  Target: LAMA2; (+) strand; PAM type: YTN; PAM sequence: CTT
taacttctgtgtttctttaa

SEQ ID NO: 411166 - DNA, 20 bp, Artificial Sequence
  Description of Artificial Sequence: Synthetic oligonucleotide
  Target: LAMA2; (+) strand; PAM type: YTN; PAM sequence: TTT
aacttctgtgtttctttaac

SEQ ID NO: 411167 - DNA, 20 bp, Artificial Sequence
  Description of Artificial Sequence: Synthetic oligonucleotide
  Target: LAMA2; (+) strand; PAM type: YTN; PAM sequence: TTA
acttctgtgtttctttaact

SEQ ID NO: 411168 - DNA, 20 bp, Artificial Sequence
  Description of Artificial Sequence: Synthetic oligonucleotide
  Target: LAMA2; (+) strand; PAM type: YTN; PAM sequence: CTT
ctgtgtttctttaacttaat

SEQ ID NO: 411169 - DNA, 20 bp, Artificial Sequence
  Description of Artificial Sequence: Synthetic oligonucleotide
  Target: LAMA2; (+) strand; PAM type: YTN; PAM sequence: TTC
tgtgtttctttaacttaatt

SEQ ID NO: 411170 - DNA, 20 bp, Artificial Sequence
  Description of Artificial Sequence: Synthetic oligonucleotide
  Target: LAMA2; (+) strand; PAM type: YTN; PAM sequence: CTG
tgtttctttaacttaattat

SEQ ID NO: 411171 - DNA, 20 bp, Artificial Sequence
  Description of Artificial Sequence: Synthetic oligonucleotide
  Target: LAMA2; (+) strand; PAM type: YTN; PAM sequence: TTT
ctttaacttaattattctag

SEQ ID NO: 411172 - DNA, 20 bp, Artificial Sequence
  Description of Artificial Sequence: Synthetic oligonucleotide
  Target: LAMA2; (+) strand; PAM type: YTN; PAM sequence: TTC
tttaacttaattattctagt

SEQ ID NO: 411173 - DNA, 20 bp, Artificial Sequence
  Description of Artificial Sequence: Synthetic oligonucleotide
  Target: LAMA2; (+) strand; PAM type: YTN; PAM sequence: CTT
taacttaattattctagtta

SEQ ID NO: 411174 - DNA, 20 bp, Artificial Sequence
  Description of Artificial Sequence: Synthetic oligonucleotide
  Target: LAMA2; (+) strand; PAM type: YTN; PAM sequence: TTT
aacttaattattctagttag

SEQ ID NO: 411175 - DNA, 20 bp, Artificial Sequence
  Description of Artificial Sequence: Synthetic oligonucleotide
  Target: LAMA2; (+) strand; PAM type: YTN; PAM sequence: TTA
acttaattattctagttagt

SEQ ID NO: 411176 - DNA, 20 bp, Artificial Sequence
  Description of Artificial Sequence: Synthetic oligonucleotide
  Target: LAMA2; (+) strand; PAM type: YTN; PAM sequence: CTT
aattattctagttagtttaa

SEQ ID NO: 411177 - DNA, 20 bp, Artificial Sequence
  Description of Artificial Sequence: Synthetic oligonucleotide
  Target: LAMA2; (+) strand; PAM type: YTN; PAM sequence: TTA
attattctagttagtttaac

SEQ ID NO: 411178 - DNA, 20 bp, Artificial Sequence
  Description of Artificial Sequence: Synthetic oligonucleotide
  Target: LAMA2; (+) strand; PAM type: YTN; PAM sequence: TTA
ttctagttagtttaactttt

SEQ ID NO: 411179 - DNA, 20 bp, Artificial Sequence
  Description of Artificial Sequence: Synthetic oligonucleotide
  Target: LAMA2; (+) strand; PAM type: YTN; PAM sequence: TTC
tagttagtttaacttttcac

SEQ ID NO: 411180 - DNA, 20 bp, Artificial Sequence
  Description of Artificial Sequence: Synthetic oligonucleotide
  Target: LAMA2; (+) strand; PAM type: YTN; PAM sequence: CTA
gttagtttaacttttcacat

SEQ ID NO: 411181 - DNA, 20 bp, Artificial Sequence
  Description of Artificial Sequence: Synthetic oligonucleotide
  Target: LAMA2; (+) strand; PAM type: YTN; PAM sequence: TTA
gtttaacttttcacattttt

SEQ ID NO: 411182 - DNA, 20 bp, Artificial Sequence
  Description of Artificial Sequence: Synthetic oligonucleotide
  Target: LAMA2; (+) strand; PAM type: YTN; PAM sequence: TTT
aacttttcacatttttaggg

SEQ ID NO: 411183 - DNA, 20 bp, Artificial Sequence
  Description of Artificial Sequence: Synthetic oligonucleotide
  Target: LAMA2; (+) strand; PAM type: YTN; PAM sequence: TTA
acttttcacatttttagggt

SEQ ID NO: 411184 - DNA, 20 bp, Artificial Sequence
  Description of Artificial Sequence: Synthetic oligonucleotide
  Target: LAMA2; (+) strand; PAM type: YTN; PAM sequence: CTT
ttcacatttttagggtgggt

SEQ ID NO: 411185 - DNA, 20 bp, Artificial Sequence
  Description of Artificial Sequence: Synthetic oligonucleotide
  Target: LAMA2; (+) strand; PAM type: YTN; PAM sequence: TTT
tcacatttttagggtgggtg

SEQ ID NO: 411186 - DNA, 20 bp, Artificial Sequence
  Description of Artificial Sequence: Synthetic oligonucleotide
  Target: LAMA2; (+) strand; PAM type: YTN; PAM sequence: TTT
cacatttttagggtgggtgg

SEQ ID NO: 411187 - DNA, 20 bp, Artificial Sequence
  Description of Artificial Sequence: Synthetic oligonucleotide
  Target: LAMA2; (+) strand; PAM type: YTN; PAM sequence: TTC
acatttttagggtgggtggc

SEQ ID NO: 411188 - DNA, 20 bp, Artificial Sequence
  Description of Artificial Sequence: Synthetic oligonucleotide
  Target: LAMA2; (+) strand; PAM type: YTN; PAM sequence: TTT
ttagggtgggtggcaggtgc

SEQ ID NO: 411189 - DNA, 20 bp, Artificial Sequence
  Description of Artificial Sequence: Synthetic oligonucleotide
  Target: LAMA2; (+) strand; PAM type: YTN; PAM sequence: TTT
tagggtgggtggcaggtgct

SEQ ID NO: 411190 - DNA, 20 bp, Artificial Sequence
  Description of Artificial Sequence: Synthetic oligonucleotide
  Target: LAMA2; (+) strand; PAM type: YTN; PAM sequence: TTT
agggtgggtggcaggtgctg

SEQ ID NO: 411191 - DNA, 20 bp, Artificial Sequence
  Description of Artificial Sequence: Synthetic oligonucleotide
  Target: LAMA2; (+) strand; PAM type: YTN; PAM sequence: TTA
gggtgggtggcaggtgctgg

SEQ ID NO: 411192 - DNA, 20 bp, Artificial Sequence
  Description of Artificial Sequence: Synthetic oligonucleotide
  Target: LAMA2; (+) strand; PAM type: YTN; PAM sequence: CTG
gaaaaaaagggatgtggtga

SEQ ID NO: 411193 - DNA, 20 bp, Artificial Sequence
  Description of Artificial Sequence: Synthetic oligonucleotide
  Target: LAMA2; (+) strand; PAM type: YTN; PAM sequence: TTC
aatttttaagcaattccaaa

SEQ ID NO: 411194 - DNA, 20 bp, Artificial Sequence
  Description of Artificial Sequence: Synthetic oligonucleotide
  Target: LAMA2; (+) strand; PAM type: YTN; PAM sequence: TTT
ttaagcaattccaaaccctt

SEQ ID NO: 411195 - DNA, 20 bp, Artificial Sequence
  Description of Artificial Sequence: Synthetic oligonucleotide
  Target: LAMA2; (+) strand; PAM type: YTN; PAM sequence: TTT
taagcaattccaaacccttt

SEQ ID NO: 411196 - DNA, 20 bp, Artificial Sequence
  Description of Artificial Sequence: Synthetic oligonucleotide
  Target: LAMA2; (+) strand; PAM type: YTN; PAM sequence: TTT
aagcaattccaaaccctttt

SEQ ID NO: 411197 - DNA, 20 bp, Artificial Sequence
  Description of Artificial Sequence: Synthetic oligonucleotide
  Target: LAMA2; (+) strand; PAM type: YTN; PAM sequence: TTA
agcaattccaaaccctttta

SEQ ID NO: 411198 - DNA, 20 bp, Artificial Sequence
  Description of Artificial Sequence: Synthetic oligonucleotide
  Target: LAMA2; (+) strand; PAM type: YTN; PAM sequence: TTC
caaacccttttattggtttg

SEQ ID NO: 411199 - DNA, 20 bp, Artificial Sequence
  Description of Artificial Sequence: Synthetic oligonucleotide
  Target: LAMA2; (+) strand; PAM type: YTN; PAM sequence: CTT
ttattggtttgatatgtaat

SEQ ID NO: 411200 - DNA, 20 bp, Artificial Sequence
  Description of Artificial Sequence: Synthetic oligonucleotide
  Target: LAMA2; (+) strand; PAM type: YTN; PAM sequence: TTT
tattggtttgatatgtaatg

SEQ ID NO: 411201 - DNA, 20 bp, Artificial Sequence
  Description of Artificial Sequence: Synthetic oligonucleotide
  Target: LAMA2; (+) strand; PAM type: YTN; PAM sequence: TTT
attggtttgatatgtaatga

SEQ ID NO: 411202 - DNA, 20 bp, Artificial Sequence
  Description of Artificial Sequence: Synthetic oligonucleotide
  Target: LAMA2; (+) strand; PAM type: YTN; PAM sequence: TTA
ttggtttgatatgtaatgat

SEQ ID NO: 411203 - DNA, 20 bp, Artificial Sequence
  Description of Artificial Sequence: Synthetic oligonucleotide
  Target: LAMA2; (+) strand; PAM type: YTN; PAM sequence: TTG
gtttgatatgtaatgatgat

SEQ ID NO: 411204 - DNA, 20 bp, Artificial Sequence
  Description of Artificial Sequence: Synthetic oligonucleotide
  Target: LAMA2; (+) strand; PAM type: YTN; PAM sequence: TTT
gatatgtaatgatgatatat

SEQ ID NO: 411205 - DNA, 20 bp, Artificial Sequence
  Description of Artificial Sequence: Synthetic oligonucleotide
  Target: LAMA2; (+) strand; PAM type: YTN; PAM sequence: TTG
atatgtaatgatgatatata

SEQ ID NO: 411206 - DNA, 20 bp, Artificial Sequence
  Description of Artificial Sequence: Synthetic oligonucleotide
  Target: LAMA2; (+) strand; PAM type: YTN; PAM sequence: TTG
taatgatgtggttattaaat

SEQ ID NO: 411207 - DNA, 20 bp, Artificial Sequence
  Description of Artificial Sequence: Synthetic oligonucleotide
  Target: LAMA2; (+) strand; PAM type: YTN; PAM sequence: TTA
ttaaataagtcctctataat

SEQ ID NO: 411208 - DNA, 20 bp, Artificial Sequence
  Description of Artificial Sequence: Synthetic oligonucleotide
  Target: LAMA2; (+) strand; PAM type: YTN; PAM sequence: TTA
aataagtcctctataatttt

SEQ ID NO: 411209 - DNA, 20 bp, Artificial Sequence
  Description of Artificial Sequence: Synthetic oligonucleotide
  Target: LAMA2; (+) strand; PAM type: YTN; PAM sequence: CTC
tataattttcacttctcacc

SEQ ID NO: 411210 - DNA, 20 bp, Artificial Sequence
  Description of Artificial Sequence: Synthetic oligonucleotide
  Target: LAMA2; (+) strand; PAM type: YTN; PAM sequence: CTA
taattttcacttctcaccat

SEQ ID NO: 411211 - DNA, 20 bp, Artificial Sequence
  Description of Artificial Sequence: Synthetic oligonucleotide
  Target: LAMA2; (+) strand; PAM type: YTN; PAM sequence: TTT
tcacttctcaccattttcca

SEQ ID NO: 411212 - DNA, 20 bp, Artificial Sequence
  Description of Artificial Sequence: Synthetic oligonucleotide
  Target: LAMA2; (+) strand; PAM type: YTN; PAM sequence: TTT
cacttctcaccattttccat

SEQ ID NO: 411213 - DNA, 20 bp, Artificial Sequence
  Description of Artificial Sequence: Synthetic oligonucleotide
  Target: LAMA2; (+) strand; PAM type: YTN; PAM sequence: TTC
acttctcaccattttccatt

SEQ ID NO: 411214 - DNA, 20 bp, Artificial Sequence
  Description of Artificial Sequence: Synthetic oligonucleotide
  Target: LAMA2; (+) strand; PAM type: YTN; PAM sequence: CTT
ctcaccattttccatttttg

SEQ ID NO: 411215 - DNA, 20 bp, Artificial Sequence
  Description of Artificial Sequence: Synthetic oligonucleotide
  Target: LAMA2; (+) strand; PAM type: YTN; PAM sequence: TTC
tcaccattttccatttttgt

SEQ ID NO: 411216 - DNA, 20 bp, Artificial Sequence
  Description of Artificial Sequence: Synthetic oligonucleotide
  Target: LAMA2; (+) strand; PAM type: YTN; PAM sequence: CTC
accattttccatttttgtat

SEQ ID NO: 411217 - DNA, 20 bp, Artificial Sequence
  Description of Artificial Sequence: Synthetic oligonucleotide
  Target: LAMA2; (+) strand; PAM type: YTN; PAM sequence: TTT
tccatttttgtatcagaatt

SEQ ID NO: 411218 - DNA, 20 bp, Artificial Sequence
  Description of Artificial Sequence: Synthetic oligonucleotide
  Target: LAMA2; (+) strand; PAM type: YTN; PAM sequence: TTT
ccatttttgtatcagaattt

SEQ ID NO: 411219 - DNA, 20 bp, Artificial Sequence
  Description of Artificial Sequence: Synthetic oligonucleotide
  Target: LAMA2; (+) strand; PAM type: YTN; PAM sequence: TTC
catttttgtatcagaattta

SEQ ID NO: 411220 - DNA, 20 bp, Artificial Sequence
  Description of Artificial Sequence: Synthetic oligonucleotide
  Target: LAMA2; (+) strand; PAM type: YTN; PAM sequence: TTT
ttgtatcagaatttagattc

SEQ ID NO: 411221 - DNA, 20 bp, Artificial Sequence
  Description of Artificial Sequence: Synthetic oligonucleotide
  Target: LAMA2; (+) strand; PAM type: YTN; PAM sequence: TTT
tgtatcagaatttagattct

SEQ ID NO: 411222 - DNA, 20 bp, Artificial Sequence
  Description of Artificial Sequence: Synthetic oligonucleotide
  Target: LAMA2; (+) strand; PAM type: YTN; PAM sequence: TTT
gtatcagaatttagattctt

SEQ ID NO: 411223 - DNA, 20 bp, Artificial Sequence
  Description of Artificial Sequence: Synthetic oligonucleotide
  Target: LAMA2; (+) strand; PAM type: YTN; PAM sequence: TTG
tatcagaatttagattcttt

SEQ ID NO: 411224 - DNA, 20 bp, Artificial Sequence
  Description of Artificial Sequence: Synthetic oligonucleotide
  Target: LAMA2; (+) strand; PAM type: YTN; PAM sequence: TTT
agattctttatttttttttt

SEQ ID NO: 411225 - DNA, 20 bp, Artificial Sequence
  Description of Artificial Sequence: Synthetic oligonucleotide
  Target: LAMA2; (+) strand; PAM type: YTN; PAM sequence: TTA
gattctttattttttttttc

SEQ ID NO: 411226 - DNA, 20 bp, Artificial Sequence
  Description of Artificial Sequence: Synthetic oligonucleotide
  Target: LAMA2; (+) strand; PAM type: YTN; PAM sequence: TTC
tttattttttttttcttgct

SEQ ID NO: 411227 - DNA, 20 bp, Artificial Sequence
  Description of Artificial Sequence: Synthetic oligonucleotide
  Target: LAMA2; (+) strand; PAM type: YTN; PAM sequence: CTT
tattttttttttcttgctct

SEQ ID NO: 411228 - DNA, 20 bp, Artificial Sequence
  Description of Artificial Sequence: Synthetic oligonucleotide
  Target: LAMA2; (+) strand; PAM type: YTN; PAM sequence: TTT
attttttttttcttgctctg

SEQ ID NO: 411229 - DNA, 20 bp, Artificial Sequence
  Description of Artificial Sequence: Synthetic oligonucleotide
  Target: LAMA2; (+) strand; PAM type: YTN; PAM sequence: TTA
ttttttttttcttgctctgt

SEQ ID NO: 411230 - DNA, 20 bp, Artificial Sequence
  Description of Artificial Sequence: Synthetic oligonucleotide
  Target: LAMA2; (+) strand; PAM type: YTN; PAM sequence: TTT
tttttttcttgctctgtcac

SEQ ID NO: 411231 - DNA, 20 bp, Artificial Sequence
  Description of Artificial Sequence: Synthetic oligonucleotide
  Target: LAMA2; (+) strand; PAM type: YTN; PAM sequence: TTT
ttttttcttgctctgtcacc

SEQ ID NO: 411232 - DNA, 20 bp, Artificial Sequence
  Description of Artificial Sequence: Synthetic oligonucleotide
  Target: LAMA2; (+) strand; PAM type: YTN; PAM sequence: TTT
tttttcttgctctgtcaccc

SEQ ID NO: 411233 - DNA, 20 bp, Artificial Sequence
  Description of Artificial Sequence: Synthetic oligonucleotide
  Target: LAMA2; (+) strand; PAM type: YTN; PAM sequence: TTT
ttttcttgctctgtcaccca

SEQ ID NO: 411234 - DNA, 20 bp, Artificial Sequence
  Description of Artificial Sequence: Synthetic oligonucleotide
  Target: LAMA2; (+) strand; PAM type: YTN; PAM sequence: TTT
tttcttgctctgtcacccag

SEQ ID NO: 411235 - DNA, 20 bp, Artificial Sequence
  Description of Artificial Sequence: Synthetic oligonucleotide
  Target: LAMA2; (+) strand; PAM type: YTN; PAM sequence: TTT
ttcttgctctgtcacccagg

SEQ ID NO: 411236 - DNA, 20 bp, Artificial Sequence
  Description of Artificial Sequence: Synthetic oligonucleotide
  Target: LAMA2; (+) strand; PAM type: YTN; PAM sequence: TTT
tcttgctctgtcacccaggc

SEQ ID NO: 411237 - DNA, 20 bp, Artificial Sequence
  Description of Artificial Sequence: Synthetic oligonucleotide
  Target: LAMA2; (+) strand; PAM type: YTN; PAM sequence: TTT
cttgctctgtcacccaggct

SEQ ID NO: 411238 - DNA, 20 bp, Artificial Sequence
  Description of Artificial Sequence: Synthetic oligonucleotide
  Target: LAMA2; (+) strand; PAM type: YTN; PAM sequence: TTC
ttgctctgtcacccaggctg

SEQ ID NO: 411239 - DNA, 20 bp, Artificial Sequence
  Description of Artificial Sequence: Synthetic oligonucleotide
  Target: LAMA2; (+) strand; PAM type: YTN; PAM sequence: CTT
gctctgtcacccaggctggt

SEQ ID NO: 411240 - DNA, 20 bp, Artificial Sequence
  Description of Artificial Sequence: Synthetic oligonucleotide
  Target: LAMA2; (+) strand; PAM type: YTN; PAM sequence: TTG
ctctgtcacccaggctggtg

SEQ ID NO: 411241 - DNA, 20 bp, Artificial Sequence
  Description of Artificial Sequence: Synthetic oligonucleotide
  Target: LAMA2; (+) strand; PAM type: YTN; PAM sequence: CTC
tgtcacccaggctggtgtgc

SEQ ID NO: 411242 - DNA, 20 bp, Artificial Sequence
  Description of Artificial Sequence: Synthetic oligonucleotide
  Target: LAMA2; (+) strand; PAM type: YTN; PAM sequence: CTG
tcacccaggctggtgtgcag

SEQ ID NO: 411243 - DNA, 20 bp, Artificial Sequence
  Description of Artificial Sequence: Synthetic oligonucleotide
  Target: LAMA2; (+) strand; PAM type: YTN; PAM sequence: CTG
gtgtgcagtggcgcaatcat

SEQ ID NO: 411244 - DNA, 20 bp, Artificial Sequence
  Description of Artificial Sequence: Synthetic oligonucleotide
  Target: LAMA2; (+) strand; PAM type: YTN; PAM sequence: CTT
actgcagccttaacctccca

SEQ ID NO: 411245 - DNA, 20 bp, Artificial Sequence
  Description of Artificial Sequence: Synthetic oligonucleotide
  Target: LAMA2; (+) strand; PAM type: YTN; PAM sequence: TTA
ctgcagccttaacctcccag

SEQ ID NO: 411246 - DNA, 20 bp, Artificial Sequence
  Description of Artificial Sequence: Synthetic oligonucleotide
  Target: LAMA2; (+) strand; PAM type: YTN; PAM sequence: CTG
cagccttaacctcccaggct

SEQ ID NO: 411247 - DNA, 20 bp, Artificial Sequence
  Description of Artificial Sequence: Synthetic oligonucleotide
  Target: LAMA2; (+) strand; PAM type: YTN; PAM sequence: CTT
aacctcccaggctcaggcga

SEQ ID NO: 411248 - DNA, 20 bp, Artificial Sequence
  Description of Artificial Sequence: Synthetic oligonucleotide
  Target: LAMA2; (+) strand; PAM type: YTN; PAM sequence: TTA
acctcccaggctcaggcgat

SEQ ID NO: 411249 - DNA, 20 bp, Artificial Sequence
  Description of Artificial Sequence: Synthetic oligonucleotide
  Target: LAMA2; (+) strand; PAM type: YTN; PAM sequence: CTC
ccaggctcaggcgatcctca

SEQ ID NO: 411250 - DNA, 20 bp, Artificial Sequence
  Description of Artificial Sequence: Synthetic oligonucleotide
  Target: LAMA2; (+) strand; PAM type: YTN; PAM sequence: CTC
aggcgatcctcatgcctcag

SEQ ID NO: 411251 - DNA, 20 bp, Artificial Sequence
  Description of Artificial Sequence: Synthetic oligonucleotide
  Target: LAMA2; (+) strand; PAM type: YTN; PAM sequence: CTC
atgcctcagcctcctgagta

SEQ ID NO: 411252 - DNA, 20 bp, Artificial Sequence
  Description of Artificial Sequence: Synthetic oligonucleotide
  Target: LAMA2; (+) strand; PAM type: YTN; PAM sequence: CTC
agcctcctgagtagctggga

SEQ ID NO: 411253 - DNA, 20 bp, Artificial Sequence
  Description of Artificial Sequence: Synthetic oligonucleotide
  Target: LAMA2; (+) strand; PAM type: YTN; PAM sequence: CTC
ctgagtagctgggactgcag

SEQ ID NO: 411254 - DNA, 20 bp, Artificial Sequence
  Description of Artificial Sequence: Synthetic oligonucleotide
  Target: LAMA2; (+) strand; PAM type: YTN; PAM sequence: CTG
agtagctgggactgcaggtg

SEQ ID NO: 411255 - DNA, 20 bp, Artificial Sequence
  Description of Artificial Sequence: Synthetic oligonucleotide
  Target: LAMA2; (+) strand; PAM type: YTN; PAM sequence: CTG
ggactgcaggtgcattccac

SEQ ID NO: 411256 - DNA, 20 bp, Artificial Sequence
  Description of Artificial Sequence: Synthetic oligonucleotide
  Target: LAMA2; (+) strand; PAM type: YTN; PAM sequence: CTG
caggtgcattccaccatgcc

SEQ ID NO: 411257 - DNA, 20 bp, Artificial Sequence
  Description of Artificial Sequence: Synthetic oligonucleotide
  Target: LAMA2; (+) strand; PAM type: YTN; PAM sequence: TTC
caccatgcccggctaatttt

SEQ ID NO: 411258 - DNA, 20 bp, Artificial Sequence
  Description of Artificial Sequence: Synthetic oligonucleotide
  Target: LAMA2; (+) strand; PAM type: YTN; PAM sequence: CTA
atttttgtatttttaataga

SEQ ID NO: 411259 - DNA, 20 bp, Artificial Sequence
  Description of Artificial Sequence: Synthetic oligonucleotide
  Target: LAMA2; (+) strand; PAM type: YTN; PAM sequence: TTT
ttgtatttttaatagagatg

SEQ ID NO: 411260 - DNA, 20 bp, Artificial Sequence
  Description of Artificial Sequence: Synthetic oligonucleotide
  Target: LAMA2; (+) strand; PAM type: YTN; PAM sequence: TTT
tgtatttttaatagagatgg

SEQ ID NO: 411261 - DNA, 20 bp, Artificial Sequence
  Description of Artificial Sequence: Synthetic oligonucleotide
  Target: LAMA2; (+) strand; PAM type: YTN; PAM sequence: TTT
gtatttttaatagagatggg

SEQ ID NO: 411262 - DNA, 20 bp, Artificial Sequence
  Description of Artificial Sequence: Synthetic oligonucleotide
  Target: LAMA2; (+) strand; PAM type: YTN; PAM sequence: TTG
tatttttaatagagatggga

SEQ ID NO: 411263 - DNA, 20 bp, Artificial Sequence
  Description of Artificial Sequence: Synthetic oligonucleotide
  Target: LAMA2; (+) strand; PAM type: YTN; PAM sequence: TTT
ttaatagagatgggatttca

SEQ ID NO: 411264 - DNA, 20 bp, Artificial Sequence
  Description of Artificial Sequence: Synthetic oligonucleotide
  Target: LAMA2; (+) strand; PAM type: YTN; PAM sequence: TTT
taatagagatgggatttcac

SEQ ID NO: 411265 - DNA, 20 bp, Artificial Sequence
  Description of Artificial Sequence: Synthetic oligonucleotide
  Target: LAMA2; (+) strand; PAM type: YTN; PAM sequence: TTT
aatagagatgggatttcacc

SEQ ID NO: 411266 - DNA, 20 bp, Artificial Sequence
  Description of Artificial Sequence: Synthetic oligonucleotide
  Target: LAMA2; (+) strand; PAM type: YTN; PAM sequence: TTA
atagagatgggatttcacca

SEQ ID NO: 411267 - DNA, 20 bp, Artificial Sequence
  Description of Artificial Sequence: Synthetic oligonucleotide
  Target: LAMA2; (+) strand; PAM type: YTN; PAM sequence: TTT
caccatgttggccaggctgg

SEQ ID NO: 411268 - DNA, 20 bp, Artificial Sequence
  Description of Artificial Sequence: Synthetic oligonucleotide
  Target: LAMA2; (+) strand; PAM type: YTN; PAM sequence: TTC
accatgttggccaggctggt

SEQ ID NO: 411269 - DNA, 20 bp, Artificial Sequence
  Description of Artificial Sequence: Synthetic oligonucleotide
  Target: LAMA2; (+) strand; PAM type: YTN; PAM sequence: TTG
gccaggctggtctcgaactc

SEQ ID NO: 411270 - DNA, 20 bp, Artificial Sequence
  Description of Artificial Sequence: Synthetic oligonucleotide
  Target: LAMA2; (+) strand; PAM type: YTN; PAM sequence: CTG
gtctcgaactcttgggaagt

SEQ ID NO: 411271 - DNA, 20 bp, Artificial Sequence
  Description of Artificial Sequence: Synthetic oligonucleotide
  Target: LAMA2; (+) strand; PAM type: YTN; PAM sequence: CTC
gaactcttgggaagtgatcc

SEQ ID NO: 411272 - DNA, 20 bp, Artificial Sequence
  Description of Artificial Sequence: Synthetic oligonucleotide
  Target: LAMA2; (+) strand; PAM type: YTN; PAM sequence: CTC
ttgggaagtgatccacctgc

SEQ ID NO: 411273 - DNA, 20 bp, Artificial Sequence
  Description of Artificial Sequence: Synthetic oligonucleotide
  Target: LAMA2; (+) strand; PAM type: YTN; PAM sequence: CTT
gggaagtgatccacctgcct

SEQ ID NO: 411274 - DNA, 20 bp, Artificial Sequence
  Description of Artificial Sequence: Synthetic oligonucleotide
  Target: LAMA2; (+) strand; PAM type: YTN; PAM sequence: TTG
ggaagtgatccacctgcctc

SEQ ID NO: 411275 - DNA, 20 bp, Artificial Sequence
  Description of Artificial Sequence: Synthetic oligonucleotide
  Target: LAMA2; (+) strand; PAM type: YTN; PAM sequence: CTG
cctcagcctgccaaagtgtt

SEQ ID NO: 411276 - DNA, 20 bp, Artificial Sequence
  Description of Artificial Sequence: Synthetic oligonucleotide
  Target: LAMA2; (+) strand; PAM type: YTN; PAM sequence: CTC
agcctgccaaagtgttgaga

SEQ ID NO: 411277 - DNA, 20 bp, Artificial Sequence
  Description of Artificial Sequence: Synthetic oligonucleotide
  Target: LAMA2; (+) strand; PAM type: YTN; PAM sequence: CTG
ccaaagtgttgagattacag

SEQ ID NO: 411278 - DNA, 20 bp, Artificial Sequence
  Description of Artificial Sequence: Synthetic oligonucleotide
  Target: LAMA2; (+) strand; PAM type: YTN; PAM sequence: TTG
agattacaggcataagccac

SEQ ID NO: 411279 - DNA, 20 bp, Artificial Sequence
  Description of Artificial Sequence: Synthetic oligonucleotide
  Target: LAMA2; (+) strand; PAM type: YTN; PAM sequence: TTA
caggcataagccaccacgcc

SEQ ID NO: 411280 - DNA, 20 bp, Artificial Sequence
  Description of Artificial Sequence: Synthetic oligonucleotide
  Target: LAMA2; (+) strand; PAM type: YTN; PAM sequence: CTG
gcccagaatttagcttttta

SEQ ID NO: 411281 - DNA, 20 bp, Artificial Sequence
  Description of Artificial Sequence: Synthetic oligonucleotide
  Target: LAMA2; (+) strand; PAM type: YTN; PAM sequence: TTT
agctttttaagagttgttat

SEQ ID NO: 411282 - DNA, 20 bp, Artificial Sequence
  Description of Artificial Sequence: Synthetic oligonucleotide
  Target: LAMA2; (+) strand; PAM type: YTN; PAM sequence: TTA
gctttttaagagttgttatt

SEQ ID NO: 411283 - DNA, 20 bp, Artificial Sequence
  Description of Artificial Sequence: Synthetic oligonucleotide
  Target: LAMA2; (+) strand; PAM type: YTN; PAM sequence: CTT
tttaagagttgttatttaag

SEQ ID NO: 411284 - DNA, 20 bp, Artificial Sequence
  Description of Artificial Sequence: Synthetic oligonucleotide
  Target: LAMA2; (+) strand; PAM type: YTN; PAM sequence: TTT
ttaagagttgttatttaaga

SEQ ID NO: 411285 - DNA, 20 bp, Artificial Sequence
  Description of Artificial Sequence: Synthetic oligonucleotide
  Target: LAMA2; (+) strand; PAM type: YTN; PAM sequence: TTT
taagagttgttatttaagaa

SEQ ID NO: 411286 - DNA, 20 bp, Artificial Sequence
  Description of Artificial Sequence: Synthetic oligonucleotide
  Target: LAMA2; (+) strand; PAM type: YTN; PAM sequence: TTT
aagagttgttatttaagaac

SEQ ID NO: 411287 - DNA, 20 bp, Artificial Sequence
  Description of Artificial Sequence: Synthetic oligonucleotide
  Target: LAMA2; (+) strand; PAM type: YTN; PAM sequence: TTA
agagttgttatttaagaact

SEQ ID NO: 411288 - DNA, 20 bp, Artificial Sequence
  Description of Artificial Sequence: Synthetic oligonucleotide
  Target: LAMA2; (+) strand; PAM type: YTN; PAM sequence: TTG
ttatttaagaactaagactt

SEQ ID NO: 411289 - DNA, 20 bp, Artificial Sequence
  Description of Artificial Sequence: Synthetic oligonucleotide
  Target: LAMA2; (+) strand; PAM type: YTN; PAM sequence: TTA
tttaagaactaagacttaaa

SEQ ID NO: 411290 - DNA, 20 bp, Artificial Sequence
  Description of Artificial Sequence: Synthetic oligonucleotide
  Target: LAMA2; (+) strand; PAM type: YTN; PAM sequence: TTT
aagaactaagacttaaaagt

SEQ ID NO: 411291 - DNA, 20 bp, Artificial Sequence
  Description of Artificial Sequence: Synthetic oligonucleotide
  Target: LAMA2; (+) strand; PAM type: YTN; PAM sequence: TTA
agaactaagacttaaaagtt

SEQ ID NO: 411292 - DNA, 20 bp, Artificial Sequence
  Description of Artificial Sequence: Synthetic oligonucleotide
  Target: LAMA2; (+) strand; PAM type: YTN; PAM sequence: CTA
agacttaaaagttaactcct

SEQ ID NO: 411293 - DNA, 20 bp, Artificial Sequence
  Description of Artificial Sequence: Synthetic oligonucleotide
  Target: LAMA2; (+) strand; PAM type: YTN; PAM sequence: CTT
aaaagttaactcctgaagtg

SEQ ID NO: 411294 - DNA, 20 bp, Artificial Sequence
  Description of Artificial Sequence: Synthetic oligonucleotide
  Target: LAMA2; (+) strand; PAM type: YTN; PAM sequence: TTA
aaagttaactcctgaagtga

SEQ ID NO: 411295 - DNA, 20 bp, Artificial Sequence
  Description of Artificial Sequence: Synthetic oligonucleotide
  Target: LAMA2; (+) strand; PAM type: YTN; PAM sequence: TTA
actcctgaagtgagaactgc

SEQ ID NO: 411296 - DNA, 20 bp, Artificial Sequence
  Description of Artificial Sequence: Synthetic oligonucleotide
  Target: LAMA2; (+) strand; PAM type: YTN; PAM sequence: CTC
ctgaagtgagaactgcctat

SEQ ID NO: 411297 - DNA, 20 bp, Artificial Sequence
  Description of Artificial Sequence: Synthetic oligonucleotide
  Target: LAMA2; (+) strand; PAM type: YTN; PAM sequence: CTG
aagtgagaactgcctattta

SEQ ID NO: 411298 - DNA, 20 bp, Artificial Sequence
  Description of Artificial Sequence: Synthetic oligonucleotide
  Target: LAMA2; (+) strand; PAM type: YTN; PAM sequence: CTG
cctatttatgagctccatat

SEQ ID NO: 411299 - DNA, 20 bp, Artificial Sequence
  Description of Artificial Sequence: Synthetic oligonucleotide
  Target: LAMA2; (+) strand; PAM type: YTN; PAM sequence: CTA
tttatgagctccatatttgt

SEQ ID NO: 411300 - DNA, 20 bp, Artificial Sequence
  Description of Artificial Sequence: Synthetic oligonucleotide
  Target: LAMA2; (+) strand; PAM type: YTN; PAM sequence: TTT
atgagctccatatttgtgct

SEQ ID NO: 411301 - DNA, 20 bp, Artificial Sequence
  Description of Artificial Sequence: Synthetic oligonucleotide
  Target: LAMA2; (+) strand; PAM type: YTN; PAM sequence: TTA
tgagctccatatttgtgcta

SEQ ID NO: 411302 - DNA, 20 bp, Artificial Sequence
  Description of Artificial Sequence: Synthetic oligonucleotide
  Target: LAMA2; (+) strand; PAM type: YTN; PAM sequence: CTC
catatttgtgctagcacagt

SEQ ID NO: 411303 - DNA, 20 bp, Artificial Sequence
  Description of Artificial Sequence: Synthetic oligonucleotide
  Target: LAMA2; (+) strand; PAM type: YTN; PAM sequence: TTT
gtgctagcacagttgacaga

SEQ ID NO: 411304 - DNA, 20 bp, Artificial Sequence
  Description of Artificial Sequence: Synthetic oligonucleotide
  Target: LAMA2; (+) strand; PAM type: YTN; PAM sequence: TTG
tgctagcacagttgacagaa

SEQ ID NO: 411305 - DNA, 20 bp, Artificial Sequence
  Description of Artificial Sequence: Synthetic oligonucleotide
  Target: LAMA2; (+) strand; PAM type: YTN; PAM sequence: CTA
gcacagttgacagaaaagat

SEQ ID NO: 411306 - DNA, 20 bp, Artificial Sequence
  Description of Artificial Sequence: Synthetic oligonucleotide
  Target: LAMA2; (+) strand; PAM type: YTN; PAM sequence: TTG
acagaaaagatctattctca

SEQ ID NO: 411307 - DNA, 20 bp, Artificial Sequence
  Description of Artificial Sequence: Synthetic oligonucleotide
  Target: LAMA2; (+) strand; PAM type: YTN; PAM sequence: CTA
ttctcagtgcccttcttttt

SEQ ID NO: 411308 - DNA, 20 bp, Artificial Sequence
  Description of Artificial Sequence: Synthetic oligonucleotide
  Target: LAMA2; (+) strand; PAM type: YTN; PAM sequence: TTC
tcagtgcccttctttttctt

SEQ ID NO: 411309 - DNA, 20 bp, Artificial Sequence
  Description of Artificial Sequence: Synthetic oligonucleotide
  Target: LAMA2; (+) strand; PAM type: YTN; PAM sequence: CTC
agtgcccttctttttcttct

SEQ ID NO: 411310 - DNA, 20 bp, Artificial Sequence
  Description of Artificial Sequence: Synthetic oligonucleotide
  Target: LAMA2; (+) strand; PAM type: YTN; PAM sequence: CTT
ctttttcttctttacaccca

SEQ ID NO: 411311 - DNA, 20 bp, Artificial Sequence
  Description of Artificial Sequence: Synthetic oligonucleotide
  Target: LAMA2; (+) strand; PAM type: YTN; PAM sequence: TTC
tttttcttctttacacccat

SEQ ID NO: 411312 - DNA, 20 bp, Artificial Sequence
  Description of Artificial Sequence: Synthetic oligonucleotide
  Target: LAMA2; (+) strand; PAM type: YTN; PAM sequence: CTT
tttcttctttacacccatca

SEQ ID NO: 411313 - DNA, 20 bp, Artificial Sequence
  Description of Artificial Sequence: Synthetic oligonucleotide
  Target: LAMA2; (+) strand; PAM type: YTN; PAM sequence: TTT
ttcttctttacacccatcac

SEQ ID NO: 411314 - DNA, 20 bp, Artificial Sequence
  Description of Artificial Sequence: Synthetic oligonucleotide
  Target: LAMA2; (+) strand; PAM type: YTN; PAM sequence: TTT
tcttctttacacccatcaca

SEQ ID NO: 411315 - DNA, 20 bp, Artificial Sequence
  Description of Artificial Sequence: Synthetic oligonucleotide
  Target: LAMA2; (+) strand; PAM type: YTN; PAM sequence: TTT
cttctttacacccatcacac

SEQ ID NO: 411316 - DNA, 20 bp, Artificial Sequence
  Description of Artificial Sequence: Synthetic oligonucleotide
  Target: LAMA2; (+) strand; PAM type: YTN; PAM sequence: TTC
ttctttacacccatcacacc

SEQ ID NO: 411317 - DNA, 20 bp, Artificial Sequence
  Description of Artificial Sequence: Synthetic oligonucleotide
  Target: LAMA2; (+) strand; PAM type: YTN; PAM sequence: CTT
ctttacacccatcacaccca

SEQ ID NO: 411318 - DNA, 20 bp, Artificial Sequence
  Description of Artificial Sequence: Synthetic oligonucleotide
  Target: LAMA2; (+) strand; PAM type: YTN; PAM sequence: TTC
tttacacccatcacacccaa

SEQ ID NO: 411319 - DNA, 20 bp, Artificial Sequence
  Description of Artificial Sequence: Synthetic oligonucleotide
  Target: LAMA2; (+) strand; PAM type: YTN; PAM sequence: CTT
tacacccatcacacccaatc

SEQ ID NO: 411320 - DNA, 20 bp, Artificial Sequence
  Description of Artificial Sequence: Synthetic oligonucleotide
  Target: LAMA2; (+) strand; PAM type: YTN; PAM sequence: TTT
acacccatcacacccaatcc

SEQ ID NO: 411321 - DNA, 20 bp, Artificial Sequence
  Description of Artificial Sequence: Synthetic oligonucleotide
  Target: LAMA2; (+) strand; PAM type: YTN; PAM sequence: TTA
cacccatcacacccaatcct

SEQ ID NO: 411322 - DNA, 20 bp, Artificial Sequence
  Description of Artificial Sequence: Synthetic oligonucleotide
  Target: LAMA2; (+) strand; PAM type: YTN; PAM sequence: CTG
ccagcaacttacagcatgag

SEQ ID NO: 411323 - DNA, 20 bp, Artificial Sequence
  Description of Artificial Sequence: Synthetic oligonucleotide
  Target: LAMA2; (+) strand; PAM type: YTN; PAM sequence: CTT
acagcatgaggacaacattc

SEQ ID NO: 411324 - DNA, 20 bp, Artificial Sequence
  Description of Artificial Sequence: Synthetic oligonucleotide
  Target: LAMA2; (+) strand; PAM type: YTN; PAM sequence: TTA
cagcatgaggacaacattca

SEQ ID NO: 411325 - DNA, 20 bp, Artificial Sequence
  Description of Artificial Sequence: Synthetic oligonucleotide
  Target: LAMA2; (+) strand; PAM type: YTN; PAM sequence: TTC
actatactacagggcaatgt

SEQ ID NO: 411326 - DNA, 20 bp, Artificial Sequence
  Description of Artificial Sequence: Synthetic oligonucleotide
  Target: LAMA2; (+) strand; PAM type: YTN; PAM sequence: CTA
tactacagggcaatgtaagg

SEQ ID NO: 411327 - DNA, 20 bp, Artificial Sequence
  Description of Artificial Sequence: Synthetic oligonucleotide
  Target: LAMA2; (+) strand; PAM type: YTN; PAM sequence: CTA
cagggcaatgtaagggtgtc

SEQ ID NO: 411328 - DNA, 20 bp, Artificial Sequence
  Description of Artificial Sequence: Synthetic oligonucleotide
  Target: LAMA2; (+) strand; PAM type: YTN; PAM sequence: CTT
gagaaagccctgccttgtga

SEQ ID NO: 411329 - DNA, 20 bp, Artificial Sequence
  Description of Artificial Sequence: Synthetic oligonucleotide
  Target: LAMA2; (+) strand; PAM type: YTN; PAM sequence: TTG
agaaagccctgccttgtgaa

SEQ ID NO: 411330 - DNA, 20 bp, Artificial Sequence
  Description of Artificial Sequence: Synthetic oligonucleotide
  Target: LAMA2; (+) strand; PAM type: YTN; PAM sequence: CTG
ccttgtgaaatggattatgt

SEQ ID NO: 411331 - DNA, 20 bp, Artificial Sequence
  Description of Artificial Sequence: Synthetic oligonucleotide
  Target: LAMA2; (+) strand; PAM type: YTN; PAM sequence: CTT
gtgaaatggattatgtcaat

SEQ ID NO: 411332 - DNA, 20 bp, Artificial Sequence
  Description of Artificial Sequence: Synthetic oligonucleotide
  Target: LAMA2; (+) strand; PAM type: YTN; PAM sequence: TTG
tgaaatggattatgtcaatc

SEQ ID NO: 411333 - DNA, 20 bp, Artificial Sequence
  Description of Artificial Sequence: Synthetic oligonucleotide
  Target: LAMA2; (+) strand; PAM type: YTN; PAM sequence: TTA
tgtcaatcttatgattaatt

SEQ ID NO: 411334 - DNA, 20 bp, Artificial Sequence
  Description of Artificial Sequence: Synthetic oligonucleotide
  Target: LAMA2; (+) strand; PAM type: YTN; PAM sequence: CTT
atgattaattcatgttgaac

SEQ ID NO: 411335 - DNA, 20 bp, Artificial Sequence
  Description of Artificial Sequence: Synthetic oligonucleotide
  Target: LAMA2; (+) strand; PAM type: YTN; PAM sequence: TTA
tgattaattcatgttgaaca

SEQ ID NO: 411336 - DNA, 20 bp, Artificial Sequence
  Description of Artificial Sequence: Synthetic oligonucleotide
  Target: LAMA2; (+) strand; PAM type: YTN; PAM sequence: TTA
attcatgttgaacacgctag

SEQ ID NO: 411337 - DNA, 20 bp, Artificial Sequence
  Description of Artificial Sequence: Synthetic oligonucleotide
  Target: LAMA2; (+) strand; PAM type: YTN; PAM sequence: TTC
atgttgaacacgctagatta

SEQ ID NO: 411338 - DNA, 20 bp, Artificial Sequence
  Description of Artificial Sequence: Synthetic oligonucleotide
  Target: LAMA2; (+) strand; PAM type: YTN; PAM sequence: TTG
aacacgctagattaaagagc

SEQ ID NO: 411339 - DNA, 20 bp, Artificial Sequence
  Description of Artificial Sequence: Synthetic oligonucleotide
  Target: LAMA2; (+) strand; PAM type: YTN; PAM sequence: CTA
gattaaagagcatttcatgc

SEQ ID NO: 411340 - DNA, 20 bp, Artificial Sequence
  Description of Artificial Sequence: Synthetic oligonucleotide
  Target: LAMA2; (+) strand; PAM type: YTN; PAM sequence: TTA
aagagcatttcatgcatatt

SEQ ID NO: 411341 - DNA, 20 bp, Artificial Sequence
  Description of Artificial Sequence: Synthetic oligonucleotide
  Target: LAMA2; (+) strand; PAM type: YTN; PAM sequence: TTT
catgcatattatctcatttg

SEQ ID NO: 411342 - DNA, 20 bp, Artificial Sequence
  Description of Artificial Sequence: Synthetic oligonucleotide
  Target: LAMA2; (+) strand; PAM type: YTN; PAM sequence: TTC
atgcatattatctcatttga

SEQ ID NO: 411343 - DNA, 20 bp, Artificial Sequence
  Description of Artificial Sequence: Synthetic oligonucleotide
  Target: LAMA2; (+) strand; PAM type: YTN; PAM sequence: TTA
tctcatttgatattatggta

SEQ ID NO: 411344 - DNA, 20 bp, Artificial Sequence
  Description of Artificial Sequence: Synthetic oligonucleotide
  Target: LAMA2; (+) strand; PAM type: YTN; PAM sequence: CTC
atttgatattatggtagctt

SEQ ID NO: 411345 - DNA, 20 bp, Artificial Sequence
  Description of Artificial Sequence: Synthetic oligonucleotide
  Target: LAMA2; (+) strand; PAM type: YTN; PAM sequence: TTT
gatattatggtagcttgtct

SEQ ID NO: 411346 - DNA, 20 bp, Artificial Sequence
  Description of Artificial Sequence: Synthetic oligonucleotide
  Target: LAMA2; (+) strand; PAM type: YTN; PAM sequence: TTG
atattatggtagcttgtctt

SEQ ID NO: 411347 - DNA, 20 bp, Artificial Sequence
  Description of Artificial Sequence: Synthetic oligonucleotide
  Target: LAMA2; (+) strand; PAM type: YTN; PAM sequence: TTA
tggtagcttgtcttctcttt

SEQ ID NO: 411348 - DNA, 20 bp, Artificial Sequence
  Description of Artificial Sequence: Synthetic oligonucleotide
  Target: LAMA2; (+) strand; PAM type: YTN; PAM sequence: CTT
gtcttctctttatacttctc

SEQ ID NO: 411349 - DNA, 20 bp, Artificial Sequence
  Description of Artificial Sequence: Synthetic oligonucleotide
  Target: LAMA2; (+) strand; PAM type: YTN; PAM sequence: TTG
tcttctctttatacttctct

SEQ ID NO: 411350 - DNA, 20 bp, Artificial Sequence
  Description of Artificial Sequence: Synthetic oligonucleotide
  Target: LAMA2; (+) strand; PAM type: YTN; PAM sequence: CTT
ctctttatacttctctctta

SEQ ID NO: 411351 - DNA, 20 bp, Artificial Sequence
  Description of Artificial Sequence: Synthetic oligonucleotide
  Target: LAMA2; (+) strand; PAM type: YTN; PAM sequence: TTC
tctttatacttctctcttat

SEQ ID NO: 411352 - DNA, 20 bp, Artificial Sequence
  Description of Artificial Sequence: Synthetic oligonucleotide
  Target: LAMA2; (+) strand; PAM type: YTN; PAM sequence: CTC
tttatacttctctcttattc

SEQ ID NO: 411353 - DNA, 20 bp, Artificial Sequence
  Description of Artificial Sequence: Synthetic oligonucleotide
  Target: LAMA2; (+) strand; PAM type: YTN; PAM sequence: CTT
tatacttctctcttattctt

SEQ ID NO: 411354 - DNA, 20 bp, Artificial Sequence
  Description of Artificial Sequence: Synthetic oligonucleotide
  Target: LAMA2; (+) strand; PAM type: YTN; PAM sequence: TTT
atacttctctcttattcttt

SEQ ID NO: 411355 - DNA, 20 bp, Artificial Sequence
  Description of Artificial Sequence: Synthetic oligonucleotide
  Target: LAMA2; (+) strand; PAM type: YTN; PAM sequence: TTA
tacttctctcttattcttta

SEQ ID NO: 411356 - DNA, 20 bp, Artificial Sequence
  Description of Artificial Sequence: Synthetic oligonucleotide
  Target: LAMA2; (+) strand; PAM type: YTN; PAM sequence: CTT
ctctcttattctttagccca

SEQ ID NO: 411357 - DNA, 20 bp, Artificial Sequence
  Description of Artificial Sequence: Synthetic oligonucleotide
  Target: LAMA2; (+) strand; PAM type: YTN; PAM sequence: TTC
tctcttattctttagcccat

SEQ ID NO: 411358 - DNA, 20 bp, Artificial Sequence
  Description of Artificial Sequence: Synthetic oligonucleotide
  Target: LAMA2; (+) strand; PAM type: YTN; PAM sequence: CTC
tcttattctttagcccatcg

SEQ ID NO: 411359 - DNA, 20 bp, Artificial Sequence
  Description of Artificial Sequence: Synthetic oligonucleotide
  Target: LAMA2; (+) strand; PAM type: YTN; PAM sequence: CTC
ttattctttagcccatcgag

SEQ ID NO: 411360 - DNA, 20 bp, Artificial Sequence
  Description of Artificial Sequence: Synthetic oligonucleotide
  Target: LAMA2; (+) strand; PAM type: YTN; PAM sequence: CTT
attctttagcccatcgagag

SEQ ID NO: 411361 - DNA, 20 bp, Artificial Sequence
  Description of Artificial Sequence: Synthetic oligonucleotide
  Target: LAMA2; (+) strand; PAM type: YTN; PAM sequence: TTA
ttctttagcccatcgagagc

SEQ ID NO: 411362 - DNA, 20 bp, Artificial Sequence
  Description of Artificial Sequence: Synthetic oligonucleotide
  Target: LAMA2; (+) strand; PAM type: YTN; PAM sequence: TTC
tttagcccatcgagagctag

SEQ ID NO: 411363 - DNA, 20 bp, Artificial Sequence
  Description of Artificial Sequence: Synthetic oligonucleotide
  Target: LAMA2; (+) strand; PAM type: YTN; PAM sequence: CTT
tagcccatcgagagctagag

SEQ ID NO: 411364 - DNA, 20 bp, Artificial Sequence
  Description of Artificial Sequence: Synthetic oligonucleotide
  Target: LAMA2; (+) strand; PAM type: YTN; PAM sequence: TTT
agcccatcgagagctagaga

SEQ ID NO: 411365 - DNA, 20 bp, Artificial Sequence
  Description of Artificial Sequence: Synthetic oligonucleotide
  Target: LAMA2; (+) strand; PAM type: YTN; PAM sequence: TTA
gcccatcgagagctagagaa

SEQ ID NO: 411366 - DNA, 20 bp, Artificial Sequence
  Description of Artificial Sequence: Synthetic oligonucleotide
  Target: LAMA2; (+) strand; PAM type: YTN; PAM sequence: CTA
gagaaaacatttctacatgt

SEQ ID NO: 411367 - DNA, 20 bp, Artificial Sequence
  Description of Artificial Sequence: Synthetic oligonucleotide
  Target: LAMA2; (+) strand; PAM type: YTN; PAM sequence: TTT
ctacatgttctatttgtgga

SEQ ID NO: 411368 - DNA, 20 bp, Artificial Sequence
  Description of Artificial Sequence: Synthetic oligonucleotide
  Target: LAMA2; (+) strand; PAM type: YTN; PAM sequence: TTC
tacatgttctatttgtggat

SEQ ID NO: 411369 - DNA, 20 bp, Artificial Sequence
  Description of Artificial Sequence: Synthetic oligonucleotide
  Target: LAMA2; (+) strand; PAM type: YTN; PAM sequence: CTA
catgttctatttgtggatat

SEQ ID NO: 411370 - DNA, 20 bp, Artificial Sequence
  Description of Artificial Sequence: Synthetic oligonucleotide
  Target: LAMA2; (+) strand; PAM type: YTN; PAM sequence: TTC
tatttgtggatatttttcat

SEQ ID NO: 411371 - DNA, 20 bp, Artificial Sequence
  Description of Artificial Sequence: Synthetic oligonucleotide
  Target: LAMA2; (+) strand; PAM type: YTN; PAM sequence: CTA
tttgtggatatttttcatgg

SEQ ID NO: 411372 - DNA, 20 bp, Artificial Sequence
  Description of Artificial Sequence: Synthetic oligonucleotide
  Target: LAMA2; (+) strand; PAM type: YTN; PAM sequence: TTT
gtggatatttttcatggagg

SEQ ID NO: 411373 - DNA, 20 bp, Artificial Sequence
  Description of Artificial Sequence: Synthetic oligonucleotide
  Target: LAMA2; (+) strand; PAM type: YTN; PAM sequence: TTG
tggatatttttcatggagga

SEQ ID NO: 411374 - DNA, 20 bp, Artificial Sequence
  Description of Artificial Sequence: Synthetic oligonucleotide
  Target: LAMA2; (+) strand; PAM type: YTN; PAM sequence: TTT
ttcatggaggatggcaggag

SEQ ID NO: 411375 - DNA, 20 bp, Artificial Sequence
  Description of Artificial Sequence: Synthetic oligonucleotide
  Target: LAMA2; (+) strand; PAM type: YTN; PAM sequence: TTT
tcatggaggatggcaggagg

SEQ ID NO: 411376 - DNA, 20 bp, Artificial Sequence
  Description of Artificial Sequence: Synthetic oligonucleotide
  Target: LAMA2; (+) strand; PAM type: YTN; PAM sequence: TTT
catggaggatggcaggaggt

SEQ ID NO: 411377 - DNA, 20 bp, Artificial Sequence
  Description of Artificial Sequence: Synthetic oligonucleotide
  Target: LAMA2; (+) strand; PAM type: YTN; PAM sequence: TTC
atggaggatggcaggaggta

SEQ ID NO: 411378 - DNA, 20 bp, Artificial Sequence
  Description of Artificial Sequence: Synthetic oligonucleotide
  Target: LAMA2; (+) strand; PAM type: YTN; PAM sequence: CTG
aacttcaagtattacagaaa

SEQ ID NO: 411379 - DNA, 20 bp, Artificial Sequence
  Description of Artificial Sequence: Synthetic oligonucleotide
  Target: LAMA2; (+) strand; PAM type: YTN; PAM sequence: CTT
caagtattacagaaatttgt

SEQ ID NO: 411380 - DNA, 20 bp, Artificial Sequence
  Description of Artificial Sequence: Synthetic oligonucleotide
  Target: LAMA2; (+) strand; PAM type: YTN; PAM sequence: TTC
aagtattacagaaatttgtt

SEQ ID NO: 411381 - DNA, 20 bp, Artificial Sequence
  Description of Artificial Sequence: Synthetic oligonucleotide
  Target: LAMA2; (+) strand; PAM type: YTN; PAM sequence: TTA
cagaaatttgttgacatgtg

SEQ ID NO: 411382 - DNA, 20 bp, Artificial Sequence
  Description of Artificial Sequence: Synthetic oligonucleotide
  Target: LAMA2; (+) strand; PAM type: YTN; PAM sequence: TTT
gttgacatgtggaaacgtga

SEQ ID NO: 411383 - DNA, 20 bp, Artificial Sequence
  Description of Artificial Sequence: Synthetic oligonucleotide
  Target: LAMA2; (+) strand; PAM type: YTN; PAM sequence: TTG
ttgacatgtggaaacgtgac

SEQ ID NO: 411384 - DNA, 20 bp, Artificial Sequence
  Description of Artificial Sequence: Synthetic oligonucleotide
  Target: LAMA2; (+) strand; PAM type: YTN; PAM sequence: TTG
acatgtggaaacgtgacaag

SEQ ID NO: 411385 - DNA, 20 bp, Artificial Sequence
  Description of Artificial Sequence: Synthetic oligonucleotide
  Target: LAMA2; (+) strand; PAM type: YTN; PAM sequence: TTC
tctgcaagtatgtgcactgt

SEQ ID NO: 411386 - DNA, 20 bp, Artificial Sequence
  Description of Artificial Sequence: Synthetic oligonucleotide
  Target: LAMA2; (+) strand; PAM type: YTN; PAM sequence: CTC
tgcaagtatgtgcactgttt

SEQ ID NO: 411387 - DNA, 20 bp, Artificial Sequence
  Description of Artificial Sequence: Synthetic oligonucleotide
  Target: LAMA2; (+) strand; PAM type: YTN; PAM sequence: CTG
caagtatgtgcactgtttag

SEQ ID NO: 411388 - DNA, 20 bp, Artificial Sequence
  Description of Artificial Sequence: Synthetic oligonucleotide
  Target: LAMA2; (+) strand; PAM type: YTN; PAM sequence: CTG
tttagaccaagtctttttaa

SEQ ID NO: 411389 - DNA, 20 bp, Artificial Sequence
  Description of Artificial Sequence: Synthetic oligonucleotide
  Target: LAMA2; (+) strand; PAM type: YTN; PAM sequence: TTT
agaccaagtctttttaacaa

SEQ ID NO: 411390 - DNA, 20 bp, Artificial Sequence
  Description of Artificial Sequence: Synthetic oligonucleotide
  Target: LAMA2; (+) strand; PAM type: YTN; PAM sequence: TTA
gaccaagtctttttaacaag

SEQ ID NO: 411391 - DNA, 20 bp, Artificial Sequence
  Description of Artificial Sequence: Synthetic oligonucleotide
  Target: LAMA2; (+) strand; PAM type: YTN; PAM sequence: CTT
tttaacaaggatagcctgtg

SEQ ID NO: 411392 - DNA, 20 bp, Artificial Sequence
  Description of Artificial Sequence: Synthetic oligonucleotide
  Target: LAMA2; (+) strand; PAM type: YTN; PAM sequence: TTT
ttaacaaggatagcctgtgt

SEQ ID NO: 411393 - DNA, 20 bp, Artificial Sequence
  Description of Artificial Sequence: Synthetic oligonucleotide
  Target: LAMA2; (+) strand; PAM type: YTN; PAM sequence: TTT
taacaaggatagcctgtgtg

SEQ ID NO: 411394 - DNA, 20 bp, Artificial Sequence
  Description of Artificial Sequence: Synthetic oligonucleotide
  Target: LAMA2; (+) strand; PAM type: YTN; PAM sequence: TTT
aacaaggatagcctgtgtgg

SEQ ID NO: 411395 - DNA, 20 bp, Artificial Sequence
  Description of Artificial Sequence: Synthetic oligonucleotide
  Target: LAMA2; (+) strand; PAM type: YTN; PAM sequence: TTA
acaaggatagcctgtgtgga

SEQ ID NO: 411396 - DNA, 20 bp, Artificial Sequence
  Description of Artificial Sequence: Synthetic oligonucleotide
  Target: LAMA2; (+) strand; PAM type: YTN; PAM sequence: CTG
tgtggatttgtagataatga

SEQ ID NO: 411397 - DNA, 20 bp, Artificial Sequence
  Description of Artificial Sequence: Synthetic oligonucleotide
  Target: LAMA2; (+) strand; PAM type: YTN; PAM sequence: TTT
gtagataatgagctggctgc

SEQ ID NO: 411398 - DNA, 20 bp, Artificial Sequence
  Description of Artificial Sequence: Synthetic oligonucleotide
  Target: LAMA2; (+) strand; PAM type: YTN; PAM sequence: TTG
tagataatgagctggctgca

SEQ ID NO: 411399 - DNA, 20 bp, Artificial Sequence
  Description of Artificial Sequence: Synthetic oligonucleotide
  Target: LAMA2; (+) strand; PAM type: YTN; PAM sequence: CTG
gctgcattcttttacttgaa

SEQ ID NO: 411400 - DNA, 20 bp, Artificial Sequence
  Description of Artificial Sequence: Synthetic oligonucleotide
  Target: LAMA2; (+) strand; PAM type: YTN; PAM sequence: CTG
cattcttttacttgaatttt

SEQ ID NO: 411401 - DNA, 20 bp, Artificial Sequence
  Description of Artificial Sequence: Synthetic oligonucleotide
  Target: LAMA2; (+) strand; PAM type: YTN; PAM sequence: TTC
ttttacttgaattttattga

SEQ ID NO: 411402 - DNA, 20 bp, Artificial Sequence
  Description of Artificial Sequence: Synthetic oligonucleotide
  Target: LAMA2; (+) strand; PAM type: YTN; PAM sequence: CTT
ttacttgaattttattgaag

SEQ ID NO: 411403 - DNA, 20 bp, Artificial Sequence
  Description of Artificial Sequence: Synthetic oligonucleotide
  Target: LAMA2; (+) strand; PAM type: YTN; PAM sequence: TTT
tacttgaattttattgaaga

SEQ ID NO: 411404 - DNA, 20 bp, Artificial Sequence
  Description of Artificial Sequence: Synthetic oligonucleotide
  Target: LAMA2; (+) strand; PAM type: YTN; PAM sequence: TTT
acttgaattttattgaagag

SEQ ID NO: 411405 - DNA, 20 bp, Artificial Sequence
  Description of Artificial Sequence: Synthetic oligonucleotide
  Target: LAMA2; (+) strand; PAM type: YTN; PAM sequence: TTA
cttgaattttattgaagagt

SEQ ID NO: 411406 - DNA, 20 bp, Artificial Sequence
  Description of Artificial Sequence: Synthetic oligonucleotide
  Target: LAMA2; (+) strand; PAM type: YTN; PAM sequence: CTT
gaattttattgaagagttca

SEQ ID NO: 411407 - DNA, 20 bp, Artificial Sequence
  Description of Artificial Sequence: Synthetic oligonucleotide
  Target: LAMA2; (+) strand; PAM type: YTN; PAM sequence: TTG
aattttattgaagagttcag

SEQ ID NO: 411408 - DNA, 20 bp, Artificial Sequence
  Description of Artificial Sequence: Synthetic oligonucleotide
  Target: LAMA2; (+) strand; PAM type: YTN; PAM sequence: TTT
tattgaagagttcagccgta

SEQ ID NO: 411409 - DNA, 20 bp, Artificial Sequence
  Description of Artificial Sequence: Synthetic oligonucleotide
  Target: LAMA2; (+) strand; PAM type: YTN; PAM sequence: TTT
attgaagagttcagccgtaa

SEQ ID NO: 411410 - DNA, 20 bp, Artificial Sequence
  Description of Artificial Sequence: Synthetic oligonucleotide
  Target: LAMA2; (+) strand; PAM type: YTN; PAM sequence: TTA
ttgaagagttcagccgtaaa

SEQ ID NO: 411411 - DNA, 20 bp, Artificial Sequence
  Description of Artificial Sequence: Synthetic oligonucleotide
  Target: LAMA2; (+) strand; PAM type: YTN; PAM sequence: TTG
aagagttcagccgtaaacct

SEQ ID NO: 411412 - DNA, 20 bp, Artificial Sequence
  Description of Artificial Sequence: Synthetic oligonucleotide
  Target: LAMA2; (+) strand; PAM type: YTN; PAM sequence: TTC
agccgtaaacctcacagttt

SEQ ID NO: 411413 - DNA, 20 bp, Artificial Sequence
  Description of Artificial Sequence: Synthetic oligonucleotide
  Target: LAMA2; (+) strand; PAM type: YTN; PAM sequence: CTC
acagtttaaaatgtgaaaac

SEQ ID NO: 411414 - DNA, 20 bp, Artificial Sequence
  Description of Artificial Sequence: Synthetic oligonucleotide
  Target: LAMA2; (+) strand; PAM type: YTN; PAM sequence: TTT
aaaatgtgaaaactaagaaa

SEQ ID NO: 411415 - DNA, 20 bp, Artificial Sequence
  Description of Artificial Sequence: Synthetic oligonucleotide
  Target: LAMA2; (+) strand; PAM type: YTN; PAM sequence: TTA
aaatgtgaaaactaagaaaa

SEQ ID NO: 411416 - DNA, 20 bp, Artificial Sequence
  Description of Artificial Sequence: Synthetic oligonucleotide
  Target: LAMA2; (+) strand; PAM type: YTN; PAM sequence: CTA
agaaaaacaatacaagtagc

SEQ ID NO: 411417 - DNA, 20 bp, Artificial Sequence
  Description of Artificial Sequence: Synthetic oligonucleotide
  Target: LAMA2; (+) strand; PAM type: YTN; PAM sequence: TTC
ctgtactgatgagctctctt

SEQ ID NO: 411418 - DNA, 20 bp, Artificial Sequence
  Description of Artificial Sequence: Synthetic oligonucleotide
  Target: LAMA2; (+) strand; PAM type: YTN; PAM sequence: CTG
tactgatgagctctctttgg

SEQ ID NO: 411419 - DNA, 20 bp, Artificial Sequence
  Description of Artificial Sequence: Synthetic oligonucleotide
  Target: LAMA2; (+) strand; PAM type: YTN; PAM sequence: CTG
atgagctctctttgggattt

SEQ ID NO: 411420 - DNA, 20 bp, Artificial Sequence
  Description of Artificial Sequence: Synthetic oligonucleotide
  Target: LAMA2; (+) strand; PAM type: YTN; PAM sequence: CTC
tctttgggatttggggaaaa

SEQ ID NO: 411421 - DNA, 20 bp, Artificial Sequence
  Description of Artificial Sequence: Synthetic oligonucleotide
  Target: LAMA2; (+) strand; PAM type: YTN; PAM sequence: CTC
tttgggatttggggaaaaga

SEQ ID NO: 411422 - DNA, 20 bp, Artificial Sequence
  Description of Artificial Sequence: Synthetic oligonucleotide
  Target: LAMA2; (+) strand; PAM type: YTN; PAM sequence: CTT
tgggatttggggaaaagaag

SEQ ID NO: 411423 - DNA, 20 bp, Artificial Sequence
  Description of Artificial Sequence: Synthetic oligonucleotide
  Target: LAMA2; (+) strand; PAM type: YTN; PAM sequence: TTT
gggatttggggaaaagaagt

SEQ ID NO: 411424 - DNA, 20 bp, Artificial Sequence
  Description of Artificial Sequence: Synthetic oligonucleotide
  Target: LAMA2; (+) strand; PAM type: YTN; PAM sequence: TTG
ggatttggggaaaagaagtg

SEQ ID NO: 411425 - DNA, 20 bp, Artificial Sequence
  Description of Artificial Sequence: Synthetic oligonucleotide
  Target: LAMA2; (+) strand; PAM type: YTN; PAM sequence: TTT
ggggaaaagaagtgagcaca

SEQ ID NO: 411426 - DNA, 20 bp, Artificial Sequence
  Description of Artificial Sequence: Synthetic oligonucleotide
  Target: LAMA2; (+) strand; PAM type: YTN; PAM sequence: TTG
gggaaaagaagtgagcacag

SEQ ID NO: 411427 - DNA, 20 bp, Artificial Sequence
  Description of Artificial Sequence: Synthetic oligonucleotide
  Target: LAMA2; (+) strand; PAM type: YTN; PAM sequence: TTT
ccctagcagctttagtgcta

SEQ ID NO: 411428 - DNA, 20 bp, Artificial Sequence
  Description of Artificial Sequence: Synthetic oligonucleotide
  Target: LAMA2; (+) strand; PAM type: YTN; PAM sequence: TTC
cctagcagctttagtgctac

SEQ ID NO: 411429 - DNA, 20 bp, Artificial Sequence
  Description of Artificial Sequence: Synthetic oligonucleotide
  Target: LAMA2; (+) strand; PAM type: YTN; PAM sequence: CTA
gcagctttagtgctacacct

SEQ ID NO: 411430 - DNA, 20 bp, Artificial Sequence
  Description of Artificial Sequence: Synthetic oligonucleotide
  Target: LAMA2; (+) strand; PAM type: YTN; PAM sequence: CTT
tagtgctacacctttaagac

SEQ ID NO: 411431 - DNA, 20 bp, Artificial Sequence
  Description of Artificial Sequence: Synthetic oligonucleotide
  Target: LAMA2; (+) strand; PAM type: YTN; PAM sequence: TTT
agtgctacacctttaagacc

SEQ ID NO: 411432 - DNA, 20 bp, Artificial Sequence
  Description of Artificial Sequence: Synthetic oligonucleotide
  Target: LAMA2; (+) strand; PAM type: YTN; PAM sequence: TTA
gtgctacacctttaagacct

SEQ ID NO: 411433 - DNA, 20 bp, Artificial Sequence
  Description of Artificial Sequence: Synthetic oligonucleotide
  Target: LAMA2; (+) strand; PAM type: YTN; PAM sequence: CTA
cacctttaagacctaagtac

SEQ ID NO: 411434 - DNA, 20 bp, Artificial Sequence
  Description of Artificial Sequence: Synthetic oligonucleotide
  Target: LAMA2; (+) strand; PAM type: YTN; PAM sequence: CTT
taagacctaagtacagtcaa

SEQ ID NO: 411435 - DNA, 20 bp, Artificial Sequence
  Description of Artificial Sequence: Synthetic oligonucleotide
  Target: LAMA2; (+) strand; PAM type: YTN; PAM sequence: TTT
aagacctaagtacagtcaag

SEQ ID NO: 411436 - DNA, 20 bp, Artificial Sequence
  Description of Artificial Sequence: Synthetic oligonucleotide
  Target: LAMA2; (+) strand; PAM type: YTN; PAM sequence: TTA
agacctaagtacagtcaagg

SEQ ID NO: 411437 - DNA, 20 bp, Artificial Sequence
  Description of Artificial Sequence: Synthetic oligonucleotide
  Target: LAMA2; (+) strand; PAM type: YTN; PAM sequence: CTA
agtacagtcaaggccaaagg

SEQ ID NO: 411438 - DNA, 20 bp, Artificial Sequence
  Description of Artificial Sequence: Synthetic oligonucleotide
  Target: LAMA2; (+) strand; PAM type: YTN; PAM sequence: CTG
attggatactgatatgtatt

SEQ ID NO: 411439 - DNA, 20 bp, Artificial Sequence
  Description of Artificial Sequence: Synthetic oligonucleotide
  Target: LAMA2; (+) strand; PAM type: YTN; PAM sequence: TTG
gatactgatatgtatttaaa

SEQ ID NO: 411440 - DNA, 20 bp, Artificial Sequence
  Description of Artificial Sequence: Synthetic oligonucleotide
  Target: LAMA2; (+) strand; PAM type: YTN; PAM sequence: CTG
atatgtatttaaagagaaaa

SEQ ID NO: 411441 - DNA, 20 bp, Artificial Sequence
  Description of Artificial Sequence: Synthetic oligonucleotide
  Target: LAMA2; (+) strand; PAM type: YTN; PAM sequence: TTT
aaagagaaaacatacatttt

SEQ ID NO: 411442 - DNA, 20 bp, Artificial Sequence
  Description of Artificial Sequence: Synthetic oligonucleotide
  Target: LAMA2; (+) strand; PAM type: YTN; PAM sequence: TTA
aagagaaaacatacattttc

SEQ ID NO: 411443 - DNA, 20 bp, Artificial Sequence
  Description of Artificial Sequence: Synthetic oligonucleotide
  Target: LAMA2; (+) strand; PAM type: YTN; PAM sequence: TTT
tccacttatcaaggaatcct

SEQ ID NO: 411444 - DNA, 20 bp, Artificial Sequence
  Description of Artificial Sequence: Synthetic oligonucleotide
  Target: LAMA2; (+) strand; PAM type: YTN; PAM sequence: TTT
ccacttatcaaggaatcctt

SEQ ID NO: 411445 - DNA, 20 bp, Artificial Sequence
  Description of Artificial Sequence: Synthetic oligonucleotide
  Target: LAMA2; (+) strand; PAM type: YTN; PAM sequence: TTC
cacttatcaaggaatccttg

SEQ ID NO: 411446 - DNA, 20 bp, Artificial Sequence
  Description of Artificial Sequence: Synthetic oligonucleotide
  Target: LAMA2; (+) strand; PAM type: YTN; PAM sequence: CTT
atcaaggaatccttgtttag

SEQ ID NO: 411447 - DNA, 20 bp, Artificial Sequence
  Description of Artificial Sequence: Synthetic oligonucleotide
  Target: LAMA2; (+) strand; PAM type: YTN; PAM sequence: TTA
tcaaggaatccttgtttaga

SEQ ID NO: 411448 - DNA, 20 bp, Artificial Sequence
  Description of Artificial Sequence: Synthetic oligonucleotide
  Target: LAMA2; (+) strand; PAM type: YTN; PAM sequence: CTT
gtttagacattaatgtataa

SEQ ID NO: 411449 - DNA, 20 bp, Artificial Sequence
  Description of Artificial Sequence: Synthetic oligonucleotide
  Target: LAMA2; (+) strand; PAM type: YTN; PAM sequence: TTG
tttagacattaatgtataaa

SEQ ID NO: 411450 - DNA, 20 bp, Artificial Sequence
  Description of Artificial Sequence: Synthetic oligonucleotide
  Target: LAMA2; (+) strand; PAM type: YTN; PAM sequence: TTT
agacattaatgtataaatat

SEQ ID NO: 411451 - DNA, 20 bp, Artificial Sequence
  Description of Artificial Sequence: Synthetic oligonucleotide
  Target: LAMA2; (+) strand; PAM type: YTN; PAM sequence: TTA
gacattaatgtataaatatt

SEQ ID NO: 411452 - DNA, 20 bp, Artificial Sequence
  Description of Artificial Sequence: Synthetic oligonucleotide
  Target: LAMA2; (+) strand; PAM type: YTN; PAM sequence: TTA
atgtataaatattactgtaa

SEQ ID NO: 411453 - DNA, 20 bp, Artificial Sequence
  Description of Artificial Sequence: Synthetic oligonucleotide
  Target: LAMA2; (+) strand; PAM type: YTN; PAM sequence: TTA
ctgtaaatgcccaagaccca

SEQ ID NO: 411454 - DNA, 20 bp, Artificial Sequence
  Description of Artificial Sequence: Synthetic oligonucleotide
  Target: LAMA2; (+) strand; PAM type: YTN; PAM sequence: CTG
taaatgcccaagacccacca

SEQ ID NO: 411455 - DNA, 20 bp, Artificial Sequence
  Description of Artificial Sequence: Synthetic oligonucleotide
  Target: LAMA2; (+) strand; PAM type: YTN; PAM sequence: CTT
aagtgcagtgttaacaataa

SEQ ID NO: 411456 - DNA, 20 bp, Artificial Sequence
  Description of Artificial Sequence: Synthetic oligonucleotide
  Target: LAMA2; (+) strand; PAM type: YTN; PAM sequence: TTA
agtgcagtgttaacaataat

SEQ ID NO: 411457 - DNA, 20 bp, Artificial Sequence
  Description of Artificial Sequence: Synthetic oligonucleotide
  Target: LAMA2; (+) strand; PAM type: YTN; PAM sequence: TTA
acaataattcagtttctcaa

SEQ ID NO: 411458 - DNA, 20 bp, Artificial Sequence
  Description of Artificial Sequence: Synthetic oligonucleotide
  Target: LAMA2; (+) strand; PAM type: YTN; PAM sequence: TTC
agtttctcaataaacatctt

SEQ ID NO: 411459 - DNA, 20 bp, Artificial Sequence
  Description of Artificial Sequence: Synthetic oligonucleotide
  Target: LAMA2; (+) strand; PAM type: YTN; PAM sequence: TTT
ctcaataaacatcttgagta

SEQ ID NO: 411460 - DNA, 20 bp, Artificial Sequence
  Description of Artificial Sequence: Synthetic oligonucleotide
  Target: LAMA2; (+) strand; PAM type: YTN; PAM sequence: TTC
tcaataaacatcttgagtag

SEQ ID NO: 411461 - DNA, 20 bp, Artificial Sequence
  Description of Artificial Sequence: Synthetic oligonucleotide
  Target: LAMA2; (+) strand; PAM type: YTN; PAM sequence: CTC
aataaacatcttgagtaggg

SEQ ID NO: 411462 - DNA, 20 bp, Artificial Sequence
  Description of Artificial Sequence: Synthetic oligonucleotide
  Target: LAMA2; (+) strand; PAM type: YTN; PAM sequence: CTT
gagtagggcttttatatttt

SEQ ID NO: 411463 - DNA, 20 bp, Artificial Sequence
  Description of Artificial Sequence: Synthetic oligonucleotide
  Target: LAMA2; (+) strand; PAM type: YTN; PAM sequence: TTG
agtagggcttttatatttta

SEQ ID NO: 411464 - DNA, 20 bp, Artificial Sequence
  Description of Artificial Sequence: Synthetic oligonucleotide
  Target: LAMA2; (+) strand; PAM type: YTN; PAM sequence: CTT
ttatattttagaagaagatt

SEQ ID NO: 411465 - DNA, 20 bp, Artificial Sequence
  Description of Artificial Sequence: Synthetic oligonucleotide
  Target: LAMA2; (+) strand; PAM type: YTN; PAM sequence: TTT
tatattttagaagaagatta

SEQ ID NO: 411466 - DNA, 20 bp, Artificial Sequence
  Description of Artificial Sequence: Synthetic oligonucleotide
  Target: LAMA2; (+) strand; PAM type: YTN; PAM sequence: TTT
atattttagaagaagattaa

SEQ ID NO: 411467 - DNA, 20 bp, Artificial Sequence
  Description of Artificial Sequence: Synthetic oligonucleotide
  Target: LAMA2; (+) strand; PAM type: YTN; PAM sequence: TTA
tattttagaagaagattaaa

SEQ ID NO: 411468 - DNA, 20 bp, Artificial Sequence
  Description of Artificial Sequence: Synthetic oligonucleotide
  Target: LAMA2; (+) strand; PAM type: YTN; PAM sequence: TTT
tagaagaagattaaagtcag

SEQ ID NO: 411469 - DNA, 20 bp, Artificial Sequence
  Description of Artificial Sequence: Synthetic oligonucleotide
  Target: LAMA2; (+) strand; PAM type: YTN; PAM sequence: TTT
agaagaagattaaagtcagt

SEQ ID NO: 411470 - DNA, 20 bp, Artificial Sequence
  Description of Artificial Sequence: Synthetic oligonucleotide
  Target: LAMA2; (+) strand; PAM type: YTN; PAM sequence: TTA
gaagaagattaaagtcagtg

SEQ ID NO: 411471 - DNA, 20 bp, Artificial Sequence
  Description of Artificial Sequence: Synthetic oligonucleotide
  Target: LAMA2; (+) strand; PAM type: YTN; PAM sequence: TTA
aagtcagtgctataaaaagt

SEQ ID NO: 411472 - DNA, 20 bp, Artificial Sequence
  Description of Artificial Sequence: Synthetic oligonucleotide
  Target: LAMA2; (+) strand; PAM type: YTN; PAM sequence: CTA
taaaaagtatcttccactta

SEQ ID NO: 411473 - DNA, 20 bp, Artificial Sequence
  Description of Artificial Sequence: Synthetic oligonucleotide
  Target: LAMA2; (+) strand; PAM type: YTN; PAM sequence: CTT
ccacttattcatccataaag

SEQ ID NO: 411474 - DNA, 20 bp, Artificial Sequence
  Description of Artificial Sequence: Synthetic oligonucleotide
  Target: LAMA2; (+) strand; PAM type: YTN; PAM sequence: TTC
cacttattcatccataaaga

SEQ ID NO: 411475 - DNA, 20 bp, Artificial Sequence
  Description of Artificial Sequence: Synthetic oligonucleotide
  Target: LAMA2; (+) strand; PAM type: YTN; PAM sequence: CTT
attcatccataaagaaaatc

SEQ ID NO: 411476 - DNA, 20 bp, Artificial Sequence
  Description of Artificial Sequence: Synthetic oligonucleotide
  Target: LAMA2; (+) strand; PAM type: YTN; PAM sequence: TTA
ttcatccataaagaaaatca

SEQ ID NO: 411477 - DNA, 20 bp, Artificial Sequence
  Description of Artificial Sequence: Synthetic oligonucleotide
  Target: LAMA2; (+) strand; PAM type: YTN; PAM sequence: TTC
atccataaagaaaatcatga

SEQ ID NO: 411478 - DNA, 20 bp, Artificial Sequence
  Description of Artificial Sequence: Synthetic oligonucleotide
  Target: LAMA2; (+) strand; PAM type: YTN; PAM sequence: TTT
tagcccacatttattagaga

SEQ ID NO: 411479 - DNA, 20 bp, Artificial Sequence
  Description of Artificial Sequence: Synthetic oligonucleotide
  Target: LAMA2; (+) strand; PAM type: YTN; PAM sequence: TTT
agcccacatttattagagaa

SEQ ID NO: 411480 - DNA, 20 bp, Artificial Sequence
  Description of Artificial Sequence: Synthetic oligonucleotide
  Target: LAMA2; (+) strand; PAM type: YTN; PAM sequence: TTA
gcccacatttattagagaaa

SEQ ID NO: 411481 - DNA, 20 bp, Artificial Sequence
  Description of Artificial Sequence: Synthetic oligonucleotide
  Target: LAMA2; (+) strand; PAM type: YTN; PAM sequence: TTT
attagagaaattaattattg

SEQ ID NO: 411482 - DNA, 20 bp, Artificial Sequence
  Description of Artificial Sequence: Synthetic oligonucleotide
  Target: LAMA2; (+) strand; PAM type: YTN; PAM sequence: TTA
ttagagaaattaattattga

SEQ ID NO: 411483 - DNA, 20 bp, Artificial Sequence
  Description of Artificial Sequence: Synthetic oligonucleotide
  Target: LAMA2; (+) strand; PAM type: YTN; PAM sequence: TTA
gagaaattaattattgactc

SEQ ID NO: 411484 - DNA, 20 bp, Artificial Sequence
  Description of Artificial Sequence: Synthetic oligonucleotide
  Target: LAMA2; (+) strand; PAM type: YTN; PAM sequence: TTA
attattgactcatgaaagaa

SEQ ID NO: 411485 - DNA, 20 bp, Artificial Sequence
  Description of Artificial Sequence: Synthetic oligonucleotide
  Target: LAMA2; (+) strand; PAM type: YTN; PAM sequence: TTA
ttgactcatgaaagaagaaa

SEQ ID NO: 411486 - DNA, 20 bp, Artificial Sequence
  Description of Artificial Sequence: Synthetic oligonucleotide
  Target: LAMA2; (+) strand; PAM type: YTN; PAM sequence: TTG
actcatgaaagaagaaaatt

SEQ ID NO: 411487 - DNA, 20 bp, Artificial Sequence
  Description of Artificial Sequence: Synthetic oligonucleotide
  Target: LAMA2; (+) strand; PAM type: YTN; PAM sequence: CTC
atgaaagaagaaaattatgc

SEQ ID NO: 411488 - DNA, 20 bp, Artificial Sequence
  Description of Artificial Sequence: Synthetic oligonucleotide
  Target: LAMA2; (+) strand; PAM type: YTN; PAM sequence: TTA
tgcaatttctatgatgattc

SEQ ID NO: 411489 - DNA, 20 bp, Artificial Sequence
  Description of Artificial Sequence: Synthetic oligonucleotide
  Target: LAMA2; (+) strand; PAM type: YTN; PAM sequence: TTT
ctatgatgattcattgtttg

SEQ ID NO: 411490 - DNA, 20 bp, Artificial Sequence
  Description of Artificial Sequence: Synthetic oligonucleotide
  Target: LAMA2; (+) strand; PAM type: YTN; PAM sequence: TTC
tatgatgattcattgtttgg

SEQ ID NO: 411491 - DNA, 20 bp, Artificial Sequence
  Description of Artificial Sequence: Synthetic oligonucleotide
  Target: LAMA2; (+) strand; PAM type: YTN; PAM sequence: CTA
tgatgattcattgtttggtg

SEQ ID NO: 411492 - DNA, 20 bp, Artificial Sequence
  Description of Artificial Sequence: Synthetic oligonucleotide
  Target: LAMA2; (+) strand; PAM type: YTN; PAM sequence: TTC
attgtttggtgctttcaaga

SEQ ID NO: 411493 - DNA, 20 bp, Artificial Sequence
  Description of Artificial Sequence: Synthetic oligonucleotide
  Target: LAMA2; (+) strand; PAM type: YTN; PAM sequence: TTG
tttggtgctttcaagaacaa

SEQ ID NO: 411494 - DNA, 20 bp, Artificial Sequence
  Description of Artificial Sequence: Synthetic oligonucleotide
  Target: LAMA2; (+) strand; PAM type: YTN; PAM sequence: TTT
ggtgctttcaagaacaaaga

SEQ ID NO: 411495 - DNA, 20 bp, Artificial Sequence
  Description of Artificial Sequence: Synthetic oligonucleotide
  Target: LAMA2; (+) strand; PAM type: YTN; PAM sequence: TTG
gtgctttcaagaacaaagat

SEQ ID NO: 411496 - DNA, 20 bp, Artificial Sequence
  Description of Artificial Sequence: Synthetic oligonucleotide
  Target: LAMA2; (+) strand; PAM type: YTN; PAM sequence: CTT
tcaagaacaaagatgccagt

SEQ ID NO: 411497 - DNA, 20 bp, Artificial Sequence
  Description of Artificial Sequence: Synthetic oligonucleotide
  Target: LAMA2; (+) strand; PAM type: YTN; PAM sequence: TTT
caagaacaaagatgccagtt

SEQ ID NO: 411498 - DNA, 20 bp, Artificial Sequence
  Description of Artificial Sequence: Synthetic oligonucleotide
  Target: LAMA2; (+) strand; PAM type: YTN; PAM sequence: TTC
aagaacaaagatgccagttt

SEQ ID NO: 411499 - DNA, 20 bp, Artificial Sequence
  Description of Artificial Sequence: Synthetic oligonucleotide
  Target: LAMA2; (+) strand; PAM type: YTN; PAM sequence: TTT
tgataaatgtaatataaatc

SEQ ID NO: 411500 - DNA, 20 bp, Artificial Sequence
  Description of Artificial Sequence: Synthetic oligonucleotide
  Target: LAMA2; (+) strand; PAM type: YTN; PAM sequence: TTT
gataaatgtaatataaatct

SEQ ID NO: 411501 - DNA, 20 bp, Artificial Sequence
  Description of Artificial Sequence: Synthetic oligonucleotide
  Target: LAMA2; (+) strand; PAM type: YTN; PAM sequence: TTG
ataaatgtaatataaatctc

SEQ ID NO: 411502 - DNA, 20 bp, Artificial Sequence
  Description of Artificial Sequence: Synthetic oligonucleotide
  Target: LAMA2; (+) strand; PAM type: YTN; PAM sequence: CTC
tgctcaggacccaggaaatt

SEQ ID NO: 411503 - DNA, 20 bp, Artificial Sequence
  Description of Artificial Sequence: Synthetic oligonucleotide
  Target: LAMA2; (+) strand; PAM type: YTN; PAM sequence: CTG
ctcaggacccaggaaattca

SEQ ID NO: 411504 - DNA, 20 bp, Artificial Sequence
  Description of Artificial Sequence: Synthetic oligonucleotide
  Target: LAMA2; (+) strand; PAM type: YTN; PAM sequence: CTC
aggacccaggaaattcaaga

SEQ ID NO: 411505 - DNA, 20 bp, Artificial Sequence
  Description of Artificial Sequence: Synthetic oligonucleotide
  Target: LAMA2; (+) strand; PAM type: YTN; PAM sequence: TTC
aagagatgcttatcaacgaa

SEQ ID NO: 411506 - DNA, 20 bp, Artificial Sequence
  Description of Artificial Sequence: Synthetic oligonucleotide
  Target: LAMA2; (+) strand; PAM type: YTN; PAM sequence: CTT
atcaacgaatcatacgcact

SEQ ID NO: 411507 - DNA, 20 bp, Artificial Sequence
  Description of Artificial Sequence: Synthetic oligonucleotide
  Target: LAMA2; (+) strand; PAM type: YTN; PAM sequence: TTA
tcaacgaatcatacgcactc

SEQ ID NO: 411508 - DNA, 20 bp, Artificial Sequence
  Description of Artificial Sequence: Synthetic oligonucleotide
  Target: LAMA2; (+) strand; PAM type: YTN; PAM sequence: CTC
ctgaatctaagaactcattt

SEQ ID NO: 411509 - DNA, 20 bp, Artificial Sequence
  Description of Artificial Sequence: Synthetic oligonucleotide
  Target: LAMA2; (+) strand; PAM type: YTN; PAM sequence: CTG
aatctaagaactcatttcca

SEQ ID NO: 411510 - DNA, 20 bp, Artificial Sequence
  Description of Artificial Sequence: Synthetic oligonucleotide
  Target: LAMA2; (+) strand; PAM type: YTN; PAM sequence: CTA
agaactcatttccaaatgtc

SEQ ID NO: 411511 - DNA, 20 bp, Artificial Sequence
  Description of Artificial Sequence: Synthetic oligonucleotide
  Target: LAMA2; (+) strand; PAM type: YTN; PAM sequence: CTC
atttccaaatgtcagccacc

SEQ ID NO: 411512 - DNA, 20 bp, Artificial Sequence
  Description of Artificial Sequence: Synthetic oligonucleotide
  Target: LAMA2; (+) strand; PAM type: YTN; PAM sequence: TTT
ccaaatgtcagccaccaatc

SEQ ID NO: 411513 - DNA, 20 bp, Artificial Sequence
  Description of Artificial Sequence: Synthetic oligonucleotide
  Target: LAMA2; (+) strand; PAM type: YTN; PAM sequence: TTC
caaatgtcagccaccaatct

SEQ ID NO: 411514 - DNA, 20 bp, Artificial Sequence
  Description of Artificial Sequence: Synthetic oligonucleotide
  Target: LAMA2; (+) strand; PAM type: YTN; PAM sequence: CTG
cagttagttagaaaagacca

SEQ ID NO: 411515 - DNA, 20 bp, Artificial Sequence
  Description of Artificial Sequence: Synthetic oligonucleotide
  Target: LAMA2; (+) strand; PAM type: YTN; PAM sequence: TTA
gttagaaaagaccattgctt

SEQ ID NO: 411516 - DNA, 20 bp, Artificial Sequence
  Description of Artificial Sequence: Synthetic oligonucleotide
  Target: LAMA2; (+) strand; PAM type: YTN; PAM sequence: TTA
gaaaagaccattgctttatt

SEQ ID NO: 411517 - DNA, 20 bp, Artificial Sequence
  Description of Artificial Sequence: Synthetic oligonucleotide
  Target: LAMA2; (+) strand; PAM type: YTN; PAM sequence: TTG
ctttattctgacctgaagtt

SEQ ID NO: 411518 - DNA, 20 bp, Artificial Sequence
  Description of Artificial Sequence: Synthetic oligonucleotide
  Target: LAMA2; (+) strand; PAM type: YTN; PAM sequence: CTT
tattctgacctgaagttaaa

SEQ ID NO: 411519 - DNA, 20 bp, Artificial Sequence
  Description of Artificial Sequence: Synthetic oligonucleotide
  Target: LAMA2; (+) strand; PAM type: YTN; PAM sequence: TTT
attctgacctgaagttaaat

SEQ ID NO: 411520 - DNA, 20 bp, Artificial Sequence
  Description of Artificial Sequence: Synthetic oligonucleotide
  Target: LAMA2; (+) strand; PAM type: YTN; PAM sequence: TTA
ttctgacctgaagttaaatg

SEQ ID NO: 411521 - DNA, 20 bp, Artificial Sequence
  Description of Artificial Sequence: Synthetic oligonucleotide
  Target: LAMA2; (+) strand; PAM type: YTN; PAM sequence: TTC
tgacctgaagttaaatgagt

SEQ ID NO: 411522 - DNA, 20 bp, Artificial Sequence
  Description of Artificial Sequence: Synthetic oligonucleotide
  Target: LAMA2; (+) strand; PAM type: YTN; PAM sequence: CTG
acctgaagttaaatgagtga

SEQ ID NO: 411523 - DNA, 20 bp, Artificial Sequence
  Description of Artificial Sequence: Synthetic oligonucleotide
  Target: LAMA2; (+) strand; PAM type: YTN; PAM sequence: CTG
aagttaaatgagtgacagtg

SEQ ID NO: 411524 - DNA, 20 bp, Artificial Sequence
  Description of Artificial Sequence: Synthetic oligonucleotide
  Target: LAMA2; (+) strand; PAM type: YTN; PAM sequence: TTA
aatgagtgacagtgtggggg

SEQ ID NO: 411525 - DNA, 20 bp, Artificial Sequence
  Description of Artificial Sequence: Synthetic oligonucleotide
  Target: LAMA2; (+) strand; PAM type: YTN; PAM sequence: TTT
tggccccgttaccaatttgg

SEQ ID NO: 411526 - DNA, 20 bp, Artificial Sequence
  Description of Artificial Sequence: Synthetic oligonucleotide
  Target: LAMA2; (+) strand; PAM type: YTN; PAM sequence: TTT
ggccccgttaccaatttggt

SEQ ID NO: 411527 - DNA, 20 bp, Artificial Sequence
  Description of Artificial Sequence: Synthetic oligonucleotide
  Target: LAMA2; (+) strand; PAM type: YTN; PAM sequence: TTG
gccccgttaccaatttggtg

SEQ ID NO: 411528 - DNA, 20 bp, Artificial Sequence
  Description of Artificial Sequence: Synthetic oligonucleotide
  Target: LAMA2; (+) strand; PAM type: YTN; PAM sequence: TTA
ccaatttggtgcactatcta

SEQ ID NO: 411529 - DNA, 20 bp, Artificial Sequence
  Description of Artificial Sequence: Synthetic oligonucleotide
  Target: LAMA2; (+) strand; PAM type: YTN; PAM sequence: TTT
ggtgcactatctacttccct

SEQ ID NO: 411530 - DNA, 20 bp, Artificial Sequence
  Description of Artificial Sequence: Synthetic oligonucleotide
  Target: LAMA2; (+) strand; PAM type: YTN; PAM sequence: TTG
gtgcactatctacttcccta

SEQ ID NO: 411531 - DNA, 20 bp, Artificial Sequence
  Description of Artificial Sequence: Synthetic oligonucleotide
  Target: LAMA2; (+) strand; PAM type: YTN; PAM sequence: CTA
tctacttccctaaacaaggc

SEQ ID NO: 411532 - DNA, 20 bp, Artificial Sequence
  Description of Artificial Sequence: Synthetic oligonucleotide
  Target: LAMA2; (+) strand; PAM type: YTN; PAM sequence: CTA
cttccctaaacaaggctttg

SEQ ID NO: 411533 - DNA, 20 bp, Artificial Sequence
  Description of Artificial Sequence: Synthetic oligonucleotide
  Target: LAMA2; (+) strand; PAM type: YTN; PAM sequence: CTT
ccctaaacaaggctttggga

SEQ ID NO: 411534 - DNA, 20 bp, Artificial Sequence
  Description of Artificial Sequence: Synthetic oligonucleotide
  Target: LAMA2; (+) strand; PAM type: YTN; PAM sequence: TTC
cctaaacaaggctttgggag

SEQ ID NO: 411535 - DNA, 20 bp, Artificial Sequence
  Description of Artificial Sequence: Synthetic oligonucleotide
  Target: LAMA2; (+) strand; PAM type: YTN; PAM sequence: CTA
aacaaggctttgggagcatg

SEQ ID NO: 411536 - DNA, 20 bp, Artificial Sequence
  Description of Artificial Sequence: Synthetic oligonucleotide
  Target: LAMA2; (+) strand; PAM type: YTN; PAM sequence: CTT
tgggagcatggcttcctcca

SEQ ID NO: 411537 - DNA, 20 bp, Artificial Sequence
  Description of Artificial Sequence: Synthetic oligonucleotide
  Target: LAMA2; (+) strand; PAM type: YTN; PAM sequence: TTT
gggagcatggcttcctccat

SEQ ID NO: 411538 - DNA, 20 bp, Artificial Sequence
  Description of Artificial Sequence: Synthetic oligonucleotide
  Target: LAMA2; (+) strand; PAM type: YTN; PAM sequence: TTG
ggagcatggcttcctccata

SEQ ID NO: 411539 - DNA, 20 bp, Artificial Sequence
  Description of Artificial Sequence: Synthetic oligonucleotide
  Target: LAMA2; (+) strand; PAM type: YTN; PAM sequence: CTT
cctccataattattcccaac

SEQ ID NO: 411540 - DNA, 20 bp, Artificial Sequence
  Description of Artificial Sequence: Synthetic oligonucleotide
  Target: LAMA2; (+) strand; PAM type: YTN; PAM sequence: TTC
ctccataattattcccaacc

SEQ ID NO: 411541 - DNA, 20 bp, Artificial Sequence
  Description of Artificial Sequence: Synthetic oligonucleotide
  Target: LAMA2; (+) strand; PAM type: YTN; PAM sequence: CTC
cataattattcccaaccaca

SEQ ID NO: 411542 - DNA, 20 bp, Artificial Sequence
  Description of Artificial Sequence: Synthetic oligonucleotide
  Target: LAMA2; (+) strand; PAM type: YTN; PAM sequence: TTA
ttcccaaccacatcactgct

SEQ ID NO: 411543 - DNA, 20 bp, Artificial Sequence
  Description of Artificial Sequence: Synthetic oligonucleotide
  Target: LAMA2; (+) strand; PAM type: YTN; PAM sequence: TTC
ccaaccacatcactgctcta

SEQ ID NO: 411544 - DNA, 20 bp, Artificial Sequence
  Description of Artificial Sequence: Synthetic oligonucleotide
  Target: LAMA2; (+) strand; PAM type: YTN; PAM sequence: CTG
ctctaatcaacaggtgcacc

SEQ ID NO: 411545 - DNA, 20 bp, Artificial Sequence
  Description of Artificial Sequence: Synthetic oligonucleotide
  Target: LAMA2; (+) strand; PAM type: YTN; PAM sequence: CTC
taatcaacaggtgcaccacc

SEQ ID NO: 411546 - DNA, 20 bp, Artificial Sequence
  Description of Artificial Sequence: Synthetic oligonucleotide
  Target: LAMA2; (+) strand; PAM type: YTN; PAM sequence: CTA
atcaacaggtgcaccaccac

SEQ ID NO: 411547 - DNA, 20 bp, Artificial Sequence
  Description of Artificial Sequence: Synthetic oligonucleotide
  Target: LAMA2; (+) strand; PAM type: YTN; PAM sequence: CTC
cccacccaagtcctgtctgc

SEQ ID NO: 411548 - DNA, 20 bp, Artificial Sequence
  Description of Artificial Sequence: Synthetic oligonucleotide
  Target: LAMA2; (+) strand; PAM type: YTN; PAM sequence: CTG
tctgcctacaacttgtaacc

SEQ ID NO: 411549 - DNA, 20 bp, Artificial Sequence
  Description of Artificial Sequence: Synthetic oligonucleotide
  Target: LAMA2; (+) strand; PAM type: YTN; PAM sequence: CTG
cctacaacttgtaacctgcc

SEQ ID NO: 411550 - DNA, 20 bp, Artificial Sequence
  Description of Artificial Sequence: Synthetic oligonucleotide
  Target: LAMA2; (+) strand; PAM type: YTN; PAM sequence: CTA
caacttgtaacctgccaagc

SEQ ID NO: 411551 - DNA, 20 bp, Artificial Sequence
  Description of Artificial Sequence: Synthetic oligonucleotide
  Target: LAMA2; (+) strand; PAM type: YTN; PAM sequence: CTT
gtaacctgccaagcaaaggc

SEQ ID NO: 411552 - DNA, 20 bp, Artificial Sequence
  Description of Artificial Sequence: Synthetic oligonucleotide
  Target: LAMA2; (+) strand; PAM type: YTN; PAM sequence: TTG
taacctgccaagcaaaggca

SEQ ID NO: 411553 - DNA, 20 bp, Artificial Sequence
  Description of Artificial Sequence: Synthetic oligonucleotide
  Target: LAMA2; (+) strand; PAM type: YTN; PAM sequence: CTG
ccaagcaaaggcaaatgaaa

SEQ ID NO: 411554 - DNA, 20 bp, Artificial Sequence
  Description of Artificial Sequence: Synthetic oligonucleotide
  Target: LAMA2; (+) strand; PAM type: YTN; PAM sequence: CTG
tcctcctttcatatcccatt

SEQ ID NO: 411555 - DNA, 20 bp, Artificial Sequence
  Description of Artificial Sequence: Synthetic oligonucleotide
  Target: LAMA2; (+) strand; PAM type: YTN; PAM sequence: CTC
ctttcatatcccattttccc

SEQ ID NO: 411556 - DNA, 20 bp, Artificial Sequence
  Description of Artificial Sequence: Synthetic oligonucleotide
  Target: LAMA2; (+) strand; PAM type: YTN; PAM sequence: CTT
tcatatcccattttccccat

SEQ ID NO: 411557 - DNA, 20 bp, Artificial Sequence
  Description of Artificial Sequence: Synthetic oligonucleotide
  Target: LAMA2; (+) strand; PAM type: YTN; PAM sequence: TTT
catatcccattttccccatt

SEQ ID NO: 411558 - DNA, 20 bp, Artificial Sequence
  Description of Artificial Sequence: Synthetic oligonucleotide
  Target: LAMA2; (+) strand; PAM type: YTN; PAM sequence: TTC
atatcccattttccccatta

SEQ ID NO: 411559 - DNA, 20 bp, Artificial Sequence
  Description of Artificial Sequence: Synthetic oligonucleotide
  Target: LAMA2; (+) strand; PAM type: YTN; PAM sequence: TTT
tccccattatctatttctag

SEQ ID NO: 411560 - DNA, 20 bp, Artificial Sequence
  Description of Artificial Sequence: Synthetic oligonucleotide
  Target: LAMA2; (+) strand; PAM type: YTN; PAM sequence: TTT
ccccattatctatttctagt

SEQ ID NO: 411561 - DNA, 20 bp, Artificial Sequence
  Description of Artificial Sequence: Synthetic oligonucleotide
  Target: LAMA2; (+) strand; PAM type: YTN; PAM sequence: TTC
cccattatctatttctagta

SEQ ID NO: 411562 - DNA, 20 bp, Artificial Sequence
  Description of Artificial Sequence: Synthetic oligonucleotide
  Target: LAMA2; (+) strand; PAM type: YTN; PAM sequence: TTA
tctatttctagtactttaaa

SEQ ID NO: 411563 - DNA, 20 bp, Artificial Sequence
  Description of Artificial Sequence: Synthetic oligonucleotide
  Target: LAMA2; (+) strand; PAM type: YTN; PAM sequence: CTA
tttctagtactttaaaaagt

SEQ ID NO: 411564 - DNA, 20 bp, Artificial Sequence
  Description of Artificial Sequence: Synthetic oligonucleotide
  Target: LAMA2; (+) strand; PAM type: YTN; PAM sequence: TTT
ctagtactttaaaaagtccc

SEQ ID NO: 411565 - DNA, 20 bp, Artificial Sequence
  Description of Artificial Sequence: Synthetic oligonucleotide
  Target: LAMA2; (+) strand; PAM type: YTN; PAM sequence: TTC
tagtactttaaaaagtcccc

SEQ ID NO: 411566 - DNA, 20 bp, Artificial Sequence
  Description of Artificial Sequence: Synthetic oligonucleotide
  Target: LAMA2; (+) strand; PAM type: YTN; PAM sequence: CTA
gtactttaaaaagtccccac

SEQ ID NO: 411567 - DNA, 20 bp, Artificial Sequence
  Description of Artificial Sequence: Synthetic oligonucleotide
  Target: LAMA2; (+) strand; PAM type: YTN; PAM sequence: CTT
taaaaagtccccacaaggtg

SEQ ID NO: 411568 - DNA, 20 bp, Artificial Sequence
  Description of Artificial Sequence: Synthetic oligonucleotide
  Target: LAMA2; (+) strand; PAM type: YTN; PAM sequence: TTT
aaaaagtccccacaaggtgg

SEQ ID NO: 411569 - DNA, 20 bp, Artificial Sequence
  Description of Artificial Sequence: Synthetic oligonucleotide
  Target: LAMA2; (+) strand; PAM type: YTN; PAM sequence: TTA
aaaagtccccacaaggtggc

SEQ ID NO: 411570 - DNA, 20 bp, Artificial Sequence
  Description of Artificial Sequence: Synthetic oligonucleotide
  Target: LAMA2; (+) strand; PAM type: YTN; PAM sequence: TTG
taacacgttgagattgatga

SEQ ID NO: 411571 - DNA, 20 bp, Artificial Sequence
  Description of Artificial Sequence: Synthetic oligonucleotide
  Target: LAMA2; (+) strand; PAM type: YTN; PAM sequence: TTG
agattgatgagcctctactg

SEQ ID NO: 411572 - DNA, 20 bp, Artificial Sequence
  Description of Artificial Sequence: Synthetic oligonucleotide
  Target: LAMA2; (+) strand; PAM type: YTN; PAM sequence: TTG
atgagcctctactgagactg

SEQ ID NO: 411573 - DNA, 20 bp, Artificial Sequence
  Description of Artificial Sequence: Synthetic oligonucleotide
  Target: LAMA2; (+) strand; PAM type: YTN; PAM sequence: CTC
tactgagactgtgaattttt

SEQ ID NO: 411574 - DNA, 20 bp, Artificial Sequence
  Description of Artificial Sequence: Synthetic oligonucleotide
  Target: LAMA2; (+) strand; PAM type: YTN; PAM sequence: CTA
ctgagactgtgaattttttt

SEQ ID NO: 411575 - DNA, 20 bp, Artificial Sequence
  Description of Artificial Sequence: Synthetic oligonucleotide
  Target: LAMA2; (+) strand; PAM type: YTN; PAM sequence: CTG
agactgtgaatttttttttt

SEQ ID NO: 411576 - DNA, 20 bp, Artificial Sequence
  Description of Artificial Sequence: Synthetic oligonucleotide
  Target: LAMA2; (+) strand; PAM type: YTN; PAM sequence: CTG
tgaatttttttttttattat

SEQ ID NO: 411577 - DNA, 20 bp, Artificial Sequence
  Description of Artificial Sequence: Synthetic oligonucleotide
  Target: LAMA2; (+) strand; PAM type: YTN; PAM sequence: TTT
ttttttttattattattgtt

SEQ ID NO: 411578 - DNA, 20 bp, Artificial Sequence
  Description of Artificial Sequence: Synthetic oligonucleotide
  Target: LAMA2; (+) strand; PAM type: YTN; PAM sequence: TTT
tttttttattattattgttg

SEQ ID NO: 411579 - DNA, 20 bp, Artificial Sequence
  Description of Artificial Sequence: Synthetic oligonucleotide
  Target: LAMA2; (+) strand; PAM type: YTN; PAM sequence: TTT
ttttttattattattgttgt

SEQ ID NO: 411580 - DNA, 20 bp, Artificial Sequence
  Description of Artificial Sequence: Synthetic oligonucleotide
  Target: LAMA2; (+) strand; PAM type: YTN; PAM sequence: TTT
tttttattattattgttgtt

SEQ ID NO: 411581 - DNA, 20 bp, Artificial Sequence
  Description of Artificial Sequence: Synthetic oligonucleotide
  Target: LAMA2; (+) strand; PAM type: YTN; PAM sequence: TTT
ttttattattattgttgttt

SEQ ID NO: 411582 - DNA, 20 bp, Artificial Sequence
  Description of Artificial Sequence: Synthetic oligonucleotide
  Target: LAMA2; (+) strand; PAM type: YTN; PAM sequence: TTT
tttattattattgttgtttt

SEQ ID NO: 411583 - DNA, 20 bp, Artificial Sequence
  Description of Artificial Sequence: Synthetic oligonucleotide
  Target: LAMA2; (+) strand; PAM type: YTN; PAM sequence: TTT
ttattattattgttgtttta

SEQ ID NO: 411584 - DNA, 20 bp, Artificial Sequence
  Description of Artificial Sequence: Synthetic oligonucleotide
  Target: LAMA2; (+) strand; PAM type: YTN; PAM sequence: TTT
tattattattgttgttttaa

SEQ ID NO: 411585 - DNA, 20 bp, Artificial Sequence
  Description of Artificial Sequence: Synthetic oligonucleotide
  Target: LAMA2; (+) strand; PAM type: YTN; PAM sequence: TTT
attattattgttgttttaac

SEQ ID NO: 411586 - DNA, 20 bp, Artificial Sequence
  Description of Artificial Sequence: Synthetic oligonucleotide
  Target: LAMA2; (+) strand; PAM type: YTN; PAM sequence: TTA
ttattattgttgttttaaca

SEQ ID NO: 411587 - DNA, 20 bp, Artificial Sequence
  Description of Artificial Sequence: Synthetic oligonucleotide
  Target: LAMA2; (+) strand; PAM type: YTN; PAM sequence: TTA
ttattgttgttttaacacat

SEQ ID NO: 411588 - DNA, 20 bp, Artificial Sequence
  Description of Artificial Sequence: Synthetic oligonucleotide
  Target: LAMA2; (+) strand; PAM type: YTN; PAM sequence: TTA
ttgttgttttaacacatttg

SEQ ID NO: 411589 - DNA, 20 bp, Artificial Sequence
  Description of Artificial Sequence: Synthetic oligonucleotide
  Target: LAMA2; (+) strand; PAM type: YTN; PAM sequence: TTG
ttgttttaacacatttgaga

SEQ ID NO: 411590 - DNA, 20 bp, Artificial Sequence
  Description of Artificial Sequence: Synthetic oligonucleotide
  Target: LAMA2; (+) strand; PAM type: YTN; PAM sequence: TTG
ttttaacacatttgagagat

SEQ ID NO: 411591 - DNA, 20 bp, Artificial Sequence
  Description of Artificial Sequence: Synthetic oligonucleotide
  Target: LAMA2; (+) strand; PAM type: YTN; PAM sequence: TTT
taacacatttgagagattag

SEQ ID NO: 411592 - DNA, 20 bp, Artificial Sequence
  Description of Artificial Sequence: Synthetic oligonucleotide
  Target: LAMA2; (+) strand; PAM type: YTN; PAM sequence: TTT
aacacatttgagagattagt

SEQ ID NO: 411593 - DNA, 20 bp, Artificial Sequence
  Description of Artificial Sequence: Synthetic oligonucleotide
  Target: LAMA2; (+) strand; PAM type: YTN; PAM sequence: TTA
acacatttgagagattagtg

SEQ ID NO: 411594 - DNA, 20 bp, Artificial Sequence
  Description of Artificial Sequence: Synthetic oligonucleotide
  Target: LAMA2; (+) strand; PAM type: YTN; PAM sequence: TTT
gagagattagtgcgtccaaa

SEQ ID NO: 411595 - DNA, 20 bp, Artificial Sequence
  Description of Artificial Sequence: Synthetic oligonucleotide
  Target: LAMA2; (+) strand; PAM type: YTN; PAM sequence: TTG
agagattagtgcgtccaaaa

SEQ ID NO: 411596 - DNA, 20 bp, Artificial Sequence
  Description of Artificial Sequence: Synthetic oligonucleotide
  Target: LAMA2; (+) strand; PAM type: YTN; PAM sequence: TTA
gtgcgtccaaaacaacacag

SEQ ID NO: 411597 - DNA, 20 bp, Artificial Sequence
  Description of Artificial Sequence: Synthetic oligonucleotide
  Target: LAMA2; (+) strand; PAM type: YTN; PAM sequence: CTT
caagtatacactagcttaga

SEQ ID NO: 411598 - DNA, 20 bp, Artificial Sequence
  Description of Artificial Sequence: Synthetic oligonucleotide
  Target: LAMA2; (+) strand; PAM type: YTN; PAM sequence: TTC
aagtatacactagcttagaa

SEQ ID NO: 411599 - DNA, 20 bp, Artificial Sequence
  Description of Artificial Sequence: Synthetic oligonucleotide
  Target: LAMA2; (+) strand; PAM type: YTN; PAM sequence: CTA
gcttagaaaaggatgattca

SEQ ID NO: 411600 - DNA, 20 bp, Artificial Sequence
  Description of Artificial Sequence: Synthetic oligonucleotide
  Target: LAMA2; (+) strand; PAM type: YTN; PAM sequence: CTT
agaaaaggatgattcatctt

SEQ ID NO: 411601 - DNA, 20 bp, Artificial Sequence
  Description of Artificial Sequence: Synthetic oligonucleotide
  Target: LAMA2; (+) strand; PAM type: YTN; PAM sequence: TTA
gaaaaggatgattcatcttg

SEQ ID NO: 411602 - DNA, 20 bp, Artificial Sequence
  Description of Artificial Sequence: Synthetic oligonucleotide
  Target: LAMA2; (+) strand; PAM type: YTN; PAM sequence: TTC
atcttgcaatgaccattctt

SEQ ID NO: 411603 - DNA, 20 bp, Artificial Sequence
  Description of Artificial Sequence: Synthetic oligonucleotide
  Target: LAMA2; (+) strand; PAM type: YTN; PAM sequence: CTT
gcaatgaccattctttaaaa

SEQ ID NO: 411604 - DNA, 20 bp, Artificial Sequence
  Description of Artificial Sequence: Synthetic oligonucleotide
  Target: LAMA2; (+) strand; PAM type: YTN; PAM sequence: TTG
caatgaccattctttaaaag

SEQ ID NO: 411605 - DNA, 20 bp, Artificial Sequence
  Description of Artificial Sequence: Synthetic oligonucleotide
  Target: LAMA2; (+) strand; PAM type: YTN; PAM sequence: TTC
tttaaaagttccttaaaatt

SEQ ID NO: 411606 - DNA, 20 bp, Artificial Sequence
  Description of Artificial Sequence: Synthetic oligonucleotide
  Target: LAMA2; (+) strand; PAM type: YTN; PAM sequence: CTT
taaaagttccttaaaattac

SEQ ID NO: 411607 - DNA, 20 bp, Artificial Sequence
  Description of Artificial Sequence: Synthetic oligonucleotide
  Target: LAMA2; (+) strand; PAM type: YTN; PAM sequence: TTT
aaaagttccttaaaattacc

SEQ ID NO: 411608 - DNA, 20 bp, Artificial Sequence
  Description of Artificial Sequence: Synthetic oligonucleotide
  Target: LAMA2; (+) strand; PAM type: YTN; PAM sequence: TTA
aaagttccttaaaattacct

SEQ ID NO: 411609 - DNA, 20 bp, Artificial Sequence
  Description of Artificial Sequence: Synthetic oligonucleotide
  Target: LAMA2; (+) strand; PAM type: YTN; PAM sequence: TTC
cttaaaattacctcattaga

SEQ ID NO: 411610 - DNA, 20 bp, Artificial Sequence
  Description of Artificial Sequence: Synthetic oligonucleotide
  Target: LAMA2; (+) strand; PAM type: YTN; PAM sequence: CTT
aaaattacctcattagatct

SEQ ID NO: 411611 - DNA, 20 bp, Artificial Sequence
  Description of Artificial Sequence: Synthetic oligonucleotide
  Target: LAMA2; (+) strand; PAM type: YTN; PAM sequence: TTA
aaattacctcattagatctt

SEQ ID NO: 411612 - DNA, 20 bp, Artificial Sequence
  Description of Artificial Sequence: Synthetic oligonucleotide
  Target: LAMA2; (+) strand; PAM type: YTN; PAM sequence: TTA
cctcattagatcttttctct

SEQ ID NO: 411613 - DNA, 20 bp, Artificial Sequence
  Description of Artificial Sequence: Synthetic oligonucleotide
  Target: LAMA2; (+) strand; PAM type: YTN; PAM sequence: CTC
attagatcttttctcttacc

SEQ ID NO: 411614 - DNA, 20 bp, Artificial Sequence
  Description of Artificial Sequence: Synthetic oligonucleotide
  Target: LAMA2; (+) strand; PAM type: YTN; PAM sequence: TTA
gatcttttctcttacccttt

SEQ ID NO: 411615 - DNA, 20 bp, Artificial Sequence
  Description of Artificial Sequence: Synthetic oligonucleotide
  Target: LAMA2; (+) strand; PAM type: YTN; PAM sequence: CTT
ttctcttacccttttttctt

SEQ ID NO: 411616 - DNA, 20 bp, Artificial Sequence
  Description of Artificial Sequence: Synthetic oligonucleotide
  Target: LAMA2; (+) strand; PAM type: YTN; PAM sequence: TTT
tctcttacccttttttctta

SEQ ID NO: 411617 - DNA, 20 bp, Artificial Sequence
  Description of Artificial Sequence: Synthetic oligonucleotide
  Target: LAMA2; (+) strand; PAM type: YTN; PAM sequence: TTT
ctcttacccttttttcttag

SEQ ID NO: 411618 - DNA, 20 bp, Artificial Sequence
  Description of Artificial Sequence: Synthetic oligonucleotide
  Target: LAMA2; (+) strand; PAM type: YTN; PAM sequence: TTC
tcttacccttttttcttagc

SEQ ID NO: 411619 - DNA, 20 bp, Artificial Sequence
  Description of Artificial Sequence: Synthetic oligonucleotide
  Target: LAMA2; (+) strand; PAM type: YTN; PAM sequence: CTC
ttacccttttttcttagctt

SEQ ID NO: 411620 - DNA, 20 bp, Artificial Sequence
  Description of Artificial Sequence: Synthetic oligonucleotide
  Target: LAMA2; (+) strand; PAM type: YTN; PAM sequence: CTT
acccttttttcttagcttag

SEQ ID NO: 411621 - DNA, 20 bp, Artificial Sequence
  Description of Artificial Sequence: Synthetic oligonucleotide
  Target: LAMA2; (+) strand; PAM type: YTN; PAM sequence: TTA
cccttttttcttagcttaga

SEQ ID NO: 411622 - DNA, 20 bp, Artificial Sequence
  Description of Artificial Sequence: Synthetic oligonucleotide
  Target: LAMA2; (+) strand; PAM type: YTN; PAM sequence: CTT
ttttcttagcttagatttca

SEQ ID NO: 411623 - DNA, 20 bp, Artificial Sequence
  Description of Artificial Sequence: Synthetic oligonucleotide
  Target: LAMA2; (+) strand; PAM type: YTN; PAM sequence: TTT
tttcttagcttagatttcag

SEQ ID NO: 411624 - DNA, 20 bp, Artificial Sequence
  Description of Artificial Sequence: Synthetic oligonucleotide
  Target: LAMA2; (+) strand; PAM type: YTN; PAM sequence: TTT
ttcttagcttagatttcagt

SEQ ID NO: 411625 - DNA, 20 bp, Artificial Sequence
  Description of Artificial Sequence: Synthetic oligonucleotide
  Target: LAMA2; (+) strand; PAM type: YTN; PAM sequence: TTT
tcttagcttagatttcagtg

SEQ ID NO: 411626 - DNA, 20 bp, Artificial Sequence
  Description of Artificial Sequence: Synthetic oligonucleotide
  Target: LAMA2; (+) strand; PAM type: YTN; PAM sequence: TTT
cttagcttagatttcagtgg

SEQ ID NO: 411627 - DNA, 20 bp, Artificial Sequence
  Description of Artificial Sequence: Synthetic oligonucleotide
  Target: LAMA2; (+) strand; PAM type: YTN; PAM sequence: TTC
ttagcttagatttcagtggc

SEQ ID NO: 411628 - DNA, 20 bp, Artificial Sequence
  Description of Artificial Sequence: Synthetic oligonucleotide
  Target: LAMA2; (+) strand; PAM type: YTN; PAM sequence: CTT
agcttagatttcagtggcaa

SEQ ID NO: 411629 - DNA, 20 bp, Artificial Sequence
  Description of Artificial Sequence: Synthetic oligonucleotide
  Target: LAMA2; (+) strand; PAM type: YTN; PAM sequence: TTA
gcttagatttcagtggcaag

SEQ ID NO: 411630 - DNA, 20 bp, Artificial Sequence
  Description of Artificial Sequence: Synthetic oligonucleotide
  Target: LAMA2; (+) strand; PAM type: YTN; PAM sequence: CTT
agatttcagtggcaagcaga

SEQ ID NO: 411631 - DNA, 20 bp, Artificial Sequence
  Description of Artificial Sequence: Synthetic oligonucleotide
  Target: LAMA2; (+) strand; PAM type: YTN; PAM sequence: TTA
gatttcagtggcaagcagag

SEQ ID NO: 411632 - DNA, 20 bp, Artificial Sequence
  Description of Artificial Sequence: Synthetic oligonucleotide
  Target: LAMA2; (+) strand; PAM type: YTN; PAM sequence: TTT
cagtggcaagcagagttgaa

SEQ ID NO: 411633 - DNA, 20 bp, Artificial Sequence
  Description of Artificial Sequence: Synthetic oligonucleotide
  Target: LAMA2; (+) strand; PAM type: YTN; PAM sequence: TTC
agtggcaagcagagttgaaa

SEQ ID NO: 411634 - DNA, 20 bp, Artificial Sequence
  Description of Artificial Sequence: Synthetic oligonucleotide
  Target: LAMA2; (+) strand; PAM type: YTN; PAM sequence: TTG
aaaacatcatccttagtgac

SEQ ID NO: 411635 - DNA, 20 bp, Artificial Sequence
  Description of Artificial Sequence: Synthetic oligonucleotide
  Target: LAMA2; (+) strand; PAM type: YTN; PAM sequence: CTT
agtgacaagatcattttatt

SEQ ID NO: 411636 - DNA, 20 bp, Artificial Sequence
  Description of Artificial Sequence: Synthetic oligonucleotide
  Target: LAMA2; (+) strand; PAM type: YTN; PAM sequence: TTA
gtgacaagatcattttattt

SEQ ID NO: 411637 - DNA, 20 bp, Artificial Sequence
  Description of Artificial Sequence: Synthetic oligonucleotide
  Target: LAMA2; (+) strand; PAM type: YTN; PAM sequence: TTT
tatttctgagcaaagcacag

SEQ ID NO: 411638 - DNA, 20 bp, Artificial Sequence
  Description of Artificial Sequence: Synthetic oligonucleotide
  Target: LAMA2; (+) strand; PAM type: YTN; PAM sequence: TTT
atttctgagcaaagcacagg

SEQ ID NO: 411639 - DNA, 20 bp, Artificial Sequence
  Description of Artificial Sequence: Synthetic oligonucleotide
  Target: LAMA2; (+) strand; PAM type: YTN; PAM sequence: TTA
tttctgagcaaagcacaggg

SEQ ID NO: 411640 - DNA, 20 bp, Artificial Sequence
  Description of Artificial Sequence: Synthetic oligonucleotide
  Target: LAMA2; (+) strand; PAM type: YTN; PAM sequence: TTT
ctgagcaaagcacagggcag

SEQ ID NO: 411641 - DNA, 20 bp, Artificial Sequence
  Description of Artificial Sequence: Synthetic oligonucleotide
  Target: LAMA2; (+) strand; PAM type: YTN; PAM sequence: TTC
tgagcaaagcacagggcagt

SEQ ID NO: 411642 - DNA, 20 bp, Artificial Sequence
  Description of Artificial Sequence: Synthetic oligonucleotide
  Target: LAMA2; (+) strand; PAM type: YTN; PAM sequence: CTG
agcaaagcacagggcagttt

SEQ ID NO: 411643 - DNA, 20 bp, Artificial Sequence
  Description of Artificial Sequence: Synthetic oligonucleotide
  Target: LAMA2; (+) strand; PAM type: YTN; PAM sequence: TTT
ctattccatctcacttgttc

SEQ ID NO: 411644 - DNA, 20 bp, Artificial Sequence
  Description of Artificial Sequence: Synthetic oligonucleotide
  Target: LAMA2; (+) strand; PAM type: YTN; PAM sequence: TTC
tattccatctcacttgttcc

SEQ ID NO: 411645 - DNA, 20 bp, Artificial Sequence
  Description of Artificial Sequence: Synthetic oligonucleotide
  Target: LAMA2; (+) strand; PAM type: YTN; PAM sequence: CTA
ttccatctcacttgttcccc

SEQ ID NO: 411646 - DNA, 20 bp, Artificial Sequence
  Description of Artificial Sequence: Synthetic oligonucleotide
  Target: LAMA2; (+) strand; PAM type: YTN; PAM sequence: TTC
catctcacttgttccccctt

SEQ ID NO: 411647 - DNA, 20 bp, Artificial Sequence
  Description of Artificial Sequence: Synthetic oligonucleotide
  Target: LAMA2; (+) strand; PAM type: YTN; PAM sequence: CTC
acttgttccccctttaaaat

SEQ ID NO: 411648 - DNA, 20 bp, Artificial Sequence
  Description of Artificial Sequence: Synthetic oligonucleotide
  Target: LAMA2; (+) strand; PAM type: YTN; PAM sequence: CTT
gttccccctttaaaatgcta

SEQ ID NO: 411649 - DNA, 20 bp, Artificial Sequence
  Description of Artificial Sequence: Synthetic oligonucleotide
  Target: LAMA2; (+) strand; PAM type: YTN; PAM sequence: TTG
ttccccctttaaaatgctag

SEQ ID NO: 411650 - DNA, 20 bp, Artificial Sequence
  Description of Artificial Sequence: Synthetic oligonucleotide
  Target: LAMA2; (+) strand; PAM type: YTN; PAM sequence: TTC
cccctttaaaatgctagaag

SEQ ID NO: 411651 - DNA, 20 bp, Artificial Sequence
  Description of Artificial Sequence: Synthetic oligonucleotide
  Target: LAMA2; (+) strand; PAM type: YTN; PAM sequence: CTT
taaaatgctagaaggaaaaa

SEQ ID NO: 411652 - DNA, 20 bp, Artificial Sequence
  Description of Artificial Sequence: Synthetic oligonucleotide
  Target: LAMA2; (+) strand; PAM type: YTN; PAM sequence: TTT
aaaatgctagaaggaaaaaa

SEQ ID NO: 411653 - DNA, 20 bp, Artificial Sequence
  Description of Artificial Sequence: Synthetic oligonucleotide
  Target: LAMA2; (+) strand; PAM type: YTN; PAM sequence: TTA
aaatgctagaaggaaaaaag

SEQ ID NO: 411654 - DNA, 20 bp, Artificial Sequence
  Description of Artificial Sequence: Synthetic oligonucleotide
  Target: LAMA2; (+) strand; PAM type: YTN; PAM sequence: CTA
gaaggaaaaaagaagcttga

SEQ ID NO: 411655 - DNA, 20 bp, Artificial Sequence
  Description of Artificial Sequence: Synthetic oligonucleotide
  Target: LAMA2; (+) strand; PAM type: YTN; PAM sequence: CTT
gagcagctggatgagcagct

SEQ ID NO: 411656 - DNA, 20 bp, Artificial Sequence
  Description of Artificial Sequence: Synthetic oligonucleotide
  Target: LAMA2; (+) strand; PAM type: YTN; PAM sequence: TTG
agcagctggatgagcagctc

SEQ ID NO: 411657 - DNA, 20 bp, Artificial Sequence
  Description of Artificial Sequence: Synthetic oligonucleotide
  Target: LAMA2; (+) strand; PAM type: YTN; PAM sequence: CTG
gatgagcagctccacccact

SEQ ID NO: 411658 - DNA, 20 bp, Artificial Sequence
  Description of Artificial Sequence: Synthetic oligonucleotide
  Target: LAMA2; (+) strand; PAM type: YTN; PAM sequence: CTC
cacccactgtgggacatgag

SEQ ID NO: 411659 - DNA, 20 bp, Artificial Sequence
  Description of Artificial Sequence: Synthetic oligonucleotide
  Target: LAMA2; (+) strand; PAM type: YTN; PAM sequence: CTG
tgggacatgaggcagaagga

SEQ ID NO: 411660 - DNA, 20 bp, Artificial Sequence
  Description of Artificial Sequence: Synthetic oligonucleotide
  Target: LAMA2; (+) strand; PAM type: YTN; PAM sequence: CTG
gtgctgccctgaacacatca

SEQ ID NO: 411661 - DNA, 20 bp, Artificial Sequence
  Description of Artificial Sequence: Synthetic oligonucleotide
  Target: LAMA2; (+) strand; PAM type: YTN; PAM sequence: CTG
ccctgaacacatcatgtttt

SEQ ID NO: 411662 - DNA, 20 bp, Artificial Sequence
  Description of Artificial Sequence: Synthetic oligonucleotide
  Target: LAMA2; (+) strand; PAM type: YTN; PAM sequence: CTG
aacacatcatgttttttttc

SEQ ID NO: 411663 - DNA, 20 bp, Artificial Sequence
  Description of Artificial Sequence: Synthetic oligonucleotide
  Target: LAMA2; (+) strand; PAM type: YTN; PAM sequence: TTT
tttttctttttgagacaggt

SEQ ID NO: 411664 - DNA, 20 bp, Artificial Sequence
  Description of Artificial Sequence: Synthetic oligonucleotide
  Target: LAMA2; (+) strand; PAM type: YTN; PAM sequence: TTT
ttttctttttgagacaggtt

SEQ ID NO: 411665 - DNA, 20 bp, Artificial Sequence
  Description of Artificial Sequence: Synthetic oligonucleotide
  Target: LAMA2; (+) strand; PAM type: YTN; PAM sequence: TTT
tttctttttgagacaggttc

SEQ ID NO: 411666 - DNA, 20 bp, Artificial Sequence
  Description of Artificial Sequence: Synthetic oligonucleotide
  Target: LAMA2; (+) strand; PAM type: YTN; PAM sequence: TTT
ttctttttgagacaggttct

SEQ ID NO: 411667 - DNA, 20 bp, Artificial Sequence
  Description of Artificial Sequence: Synthetic oligonucleotide
  Target: LAMA2; (+) strand; PAM type: YTN; PAM sequence: TTT
tctttttgagacaggttctt

SEQ ID NO: 411668 - DNA, 20 bp, Artificial Sequence
  Description of Artificial Sequence: Synthetic oligonucleotide
  Target: LAMA2; (+) strand; PAM type: YTN; PAM sequence: TTT
ctttttgagacaggttcttg

SEQ ID NO: 411669 - DNA, 20 bp, Artificial Sequence
  Description of Artificial Sequence: Synthetic oligonucleotide
  Target: LAMA2; (+) strand; PAM type: YTN; PAM sequence: TTC
tttttgagacaggttcttgc

SEQ ID NO: 411670 - DNA, 20 bp, Artificial Sequence
  Description of Artificial Sequence: Synthetic oligonucleotide
  Target: LAMA2; (+) strand; PAM type: YTN; PAM sequence: CTT
tttgagacaggttcttgctc

SEQ ID NO: 411671 - DNA, 20 bp, Artificial Sequence
  Description of Artificial Sequence: Synthetic oligonucleotide
  Target: LAMA2; (+) strand; PAM type: YTN; PAM sequence: TTT
ttgagacaggttcttgctct

SEQ ID NO: 411672 - DNA, 20 bp, Artificial Sequence
  Description of Artificial Sequence: Synthetic oligonucleotide
  Target: LAMA2; (+) strand; PAM type: YTN; PAM sequence: TTT
tgagacaggttcttgctcta

SEQ ID NO: 411673 - DNA, 20 bp, Artificial Sequence
  Description of Artificial Sequence: Synthetic oligonucleotide
  Target: LAMA2; (+) strand; PAM type: YTN; PAM sequence: TTT
gagacaggttcttgctctac

SEQ ID NO: 411674 - DNA, 20 bp, Artificial Sequence
  Description of Artificial Sequence: Synthetic oligonucleotide
  Target: LAMA2; (+) strand; PAM type: YTN; PAM sequence: TTG
agacaggttcttgctctact

SEQ ID NO: 411675 - DNA, 20 bp, Artificial Sequence
  Description of Artificial Sequence: Synthetic oligonucleotide
  Target: LAMA2; (+) strand; PAM type: YTN; PAM sequence: TTC
ttgctctactgtccaggttg

SEQ ID NO: 411676 - DNA, 20 bp, Artificial Sequence
  Description of Artificial Sequence: Synthetic oligonucleotide
  Target: LAMA2; (+) strand; PAM type: YTN; PAM sequence: CTT
gctctactgtccaggttgga

SEQ ID NO: 411677 - DNA, 20 bp, Artificial Sequence
  Description of Artificial Sequence: Synthetic oligonucleotide
  Target: LAMA2; (+) strand; PAM type: YTN; PAM sequence: TTG
ctctactgtccaggttggag

SEQ ID NO: 411678 - DNA, 20 bp, Artificial Sequence
  Description of Artificial Sequence: Synthetic oligonucleotide
  Target: LAMA2; (+) strand; PAM type: YTN; PAM sequence: CTC
tactgtccaggttggagtgc

SEQ ID NO: 411679 - DNA, 20 bp, Artificial Sequence
  Description of Artificial Sequence: Synthetic oligonucleotide
  Target: LAMA2; (+) strand; PAM type: YTN; PAM sequence: CTA
ctgtccaggttggagtgcag

SEQ ID NO: 411680 - DNA, 20 bp, Artificial Sequence
  Description of Artificial Sequence: Synthetic oligonucleotide
  Target: LAMA2; (+) strand; PAM type: YTN; PAM sequence: CTG
tccaggttggagtgcagtga

SEQ ID NO: 411681 - DNA, 20 bp, Artificial Sequence
  Description of Artificial Sequence: Synthetic oligonucleotide
  Target: LAMA2; (+) strand; PAM type: YTN; PAM sequence: TTG
gagtgcagtgatgcaatcat

SEQ ID NO: 411682 - DNA, 20 bp, Artificial Sequence
  Description of Artificial Sequence: Synthetic oligonucleotide
  Target: LAMA2; (+) strand; PAM type: YTN; PAM sequence: CTC
actctaaccttgaactccta

SEQ ID NO: 411683 - DNA, 20 bp, Artificial Sequence
  Description of Artificial Sequence: Synthetic oligonucleotide
  Target: LAMA2; (+) strand; PAM type: YTN; PAM sequence: CTC
taaccttgaactcctaggct

SEQ ID NO: 411684 - DNA, 20 bp, Artificial Sequence
  Description of Artificial Sequence: Synthetic oligonucleotide
  Target: LAMA2; (+) strand; PAM type: YTN; PAM sequence: CTA
accttgaactcctaggctca

SEQ ID NO: 411685 - DNA, 20 bp, Artificial Sequence
  Description of Artificial Sequence: Synthetic oligonucleotide
  Target: LAMA2; (+) strand; PAM type: YTN; PAM sequence: CTT
gaactcctaggctcaagtga

SEQ ID NO: 411686 - DNA, 20 bp, Artificial Sequence
  Description of Artificial Sequence: Synthetic oligonucleotide
  Target: LAMA2; (+) strand; PAM type: YTN; PAM sequence: TTG
aactcctaggctcaagtgat

SEQ ID NO: 411687 - DNA, 20 bp, Artificial Sequence
  Description of Artificial Sequence: Synthetic oligonucleotide
  Target: LAMA2; (+) strand; PAM type: YTN; PAM sequence: CTC
ctaggctcaagtgattctcc

SEQ ID NO: 411688 - DNA, 20 bp, Artificial Sequence
  Description of Artificial Sequence: Synthetic oligonucleotide
  Target: LAMA2; (+) strand; PAM type: YTN; PAM sequence: CTA
ggctcaagtgattctcctgc

SEQ ID NO: 411689 - DNA, 20 bp, Artificial Sequence
  Description of Artificial Sequence: Synthetic oligonucleotide
  Target: LAMA2; (+) strand; PAM type: YTN; PAM sequence: CTC
aagtgattctcctgccttgg

SEQ ID NO: 411690 - DNA, 20 bp, Artificial Sequence
  Description of Artificial Sequence: Synthetic oligonucleotide
  Target: LAMA2; (+) strand; PAM type: YTN; PAM sequence: TTC
tcctgccttggcctcccgag

SEQ ID NO: 411691 - DNA, 20 bp, Artificial Sequence
  Description of Artificial Sequence: Synthetic oligonucleotide
  Target: LAMA2; (+) strand; PAM type: YTN; PAM sequence: CTC
ctgccttggcctcccgagta

SEQ ID NO: 411692 - DNA, 20 bp, Artificial Sequence
  Description of Artificial Sequence: Synthetic oligonucleotide
  Target: LAMA2; (+) strand; PAM type: YTN; PAM sequence: CTG
ccttggcctcccgagtagct

SEQ ID NO: 411693 - DNA, 20 bp, Artificial Sequence
  Description of Artificial Sequence: Synthetic oligonucleotide
  Target: LAMA2; (+) strand; PAM type: YTN; PAM sequence: CTT
ggcctcccgagtagctgggg

SEQ ID NO: 411694 - DNA, 20 bp, Artificial Sequence
  Description of Artificial Sequence: Synthetic oligonucleotide
  Target: LAMA2; (+) strand; PAM type: YTN; PAM sequence: TTG
gcctcccgagtagctggggc

SEQ ID NO: 411695 - DNA, 20 bp, Artificial Sequence
  Description of Artificial Sequence: Synthetic oligonucleotide
  Target: LAMA2; (+) strand; PAM type: YTN; PAM sequence: CTC
ccgagtagctggggctttca

SEQ ID NO: 411696 - DNA, 20 bp, Artificial Sequence
  Description of Artificial Sequence: Synthetic oligonucleotide
  Target: LAMA2; (+) strand; PAM type: YTN; PAM sequence: CTG
gggctttcagcatgcaacaa

SEQ ID NO: 411697 - DNA, 20 bp, Artificial Sequence
  Description of Artificial Sequence: Synthetic oligonucleotide
  Target: LAMA2; (+) strand; PAM type: YTN; PAM sequence: CTT
tcagcatgcaacaacatgcc

SEQ ID NO: 411698 - DNA, 20 bp, Artificial Sequence
  Description of Artificial Sequence: Synthetic oligonucleotide
  Target: LAMA2; (+) strand; PAM type: YTN; PAM sequence: TTT
cagcatgcaacaacatgccc

SEQ ID NO: 411699 - DNA, 20 bp, Artificial Sequence
  Description of Artificial Sequence: Synthetic oligonucleotide
  Target: LAMA2; (+) strand; PAM type: YTN; PAM sequence: TTC
agcatgcaacaacatgccca

SEQ ID NO: 411700 - DNA, 20 bp, Artificial Sequence
  Description of Artificial Sequence: Synthetic oligonucleotide
  Target: LAMA2; (+) strand; PAM type: YTN; PAM sequence: CTA
attttttatttttttaattt

SEQ ID NO: 411701 - DNA, 20 bp, Artificial Sequence
  Description of Artificial Sequence: Synthetic oligonucleotide
  Target: LAMA2; (+) strand; PAM type: YTN; PAM sequence: TTT
tttatttttttaattttttt

SEQ ID NO: 411702 - DNA, 20 bp, Artificial Sequence
  Description of Artificial Sequence: Synthetic oligonucleotide
  Target: LAMA2; (+) strand; PAM type: YTN; PAM sequence: TTT
ttatttttttaatttttttg

SEQ ID NO: 411703 - DNA, 20 bp, Artificial Sequence
  Description of Artificial Sequence: Synthetic oligonucleotide
  Target: LAMA2; (+) strand; PAM type: YTN; PAM sequence: TTT
tatttttttaatttttttgt

SEQ ID NO: 411704 - DNA, 20 bp, Artificial Sequence
  Description of Artificial Sequence: Synthetic oligonucleotide
  Target: LAMA2; (+) strand; PAM type: YTN; PAM sequence: TTT
atttttttaatttttttgtt

SEQ ID NO: 411705 - DNA, 20 bp, Artificial Sequence
  Description of Artificial Sequence: Synthetic oligonucleotide
  Target: LAMA2; (+) strand; PAM type: YTN; PAM sequence: TTA
tttttttaatttttttgttg

SEQ ID NO: 411706 - DNA, 20 bp, Artificial Sequence
  Description of Artificial Sequence: Synthetic oligonucleotide
  Target: LAMA2; (+) strand; PAM type: YTN; PAM sequence: TTT
ttttaatttttttgttgttg

SEQ ID NO: 411707 - DNA, 20 bp, Artificial Sequence
  Description of Artificial Sequence: Synthetic oligonucleotide
  Target: LAMA2; (+) strand; PAM type: YTN; PAM sequence: TTT
tttaatttttttgttgttgt

SEQ ID NO: 411708 - DNA, 20 bp, Artificial Sequence
  Description of Artificial Sequence: Synthetic oligonucleotide
  Target: LAMA2; (+) strand; PAM type: YTN; PAM sequence: TTT
ttaatttttttgttgttgtt

SEQ ID NO: 411709 - DNA, 20 bp, Artificial Sequence
  Description of Artificial Sequence: Synthetic oligonucleotide
  Target: LAMA2; (+) strand; PAM type: YTN; PAM sequence: TTT
taatttttttgttgttgttg

SEQ ID NO: 411710 - DNA, 20 bp, Artificial Sequence
  Description of Artificial Sequence: Synthetic oligonucleotide
  Target: LAMA2; (+) strand; PAM type: YTN; PAM sequence: TTT
aatttttttgttgttgttgt

SEQ ID NO: 411711 - DNA, 20 bp, Artificial Sequence
  Description of Artificial Sequence: Synthetic oligonucleotide
  Target: LAMA2; (+) strand; PAM type: YTN; PAM sequence: TTA
atttttttgttgttgttgtt

SEQ ID NO: 411712 - DNA, 20 bp, Artificial Sequence
  Description of Artificial Sequence: Synthetic oligonucleotide
  Target: LAMA2; (+) strand; PAM type: YTN; PAM sequence: TTT
ttttgttgttgttgttcttt

SEQ ID NO: 411713 - DNA, 20 bp, Artificial Sequence
  Description of Artificial Sequence: Synthetic oligonucleotide
  Target: LAMA2; (+) strand; PAM type: YTN; PAM sequence: TTT
tttgttgttgttgttctttt

SEQ ID NO: 411714 - DNA, 20 bp, Artificial Sequence
  Description of Artificial Sequence: Synthetic oligonucleotide
  Target: LAMA2; (+) strand; PAM type: YTN; PAM sequence: TTT
ttgttgttgttgttcttttg

SEQ ID NO: 411715 - DNA, 20 bp, Artificial Sequence
  Description of Artificial Sequence: Synthetic oligonucleotide
  Target: LAMA2; (+) strand; PAM type: YTN; PAM sequence: TTT
tgttgttgttgttcttttgg

SEQ ID NO: 411716 - DNA, 20 bp, Artificial Sequence
  Description of Artificial Sequence: Synthetic oligonucleotide
  Target: LAMA2; (+) strand; PAM type: YTN; PAM sequence: TTT
gttgttgttgttcttttgga

SEQ ID NO: 411717 - DNA, 20 bp, Artificial Sequence
  Description of Artificial Sequence: Synthetic oligonucleotide
  Target: LAMA2; (+) strand; PAM type: YTN; PAM sequence: TTG
ttgttgttgttcttttggag

SEQ ID NO: 411718 - DNA, 20 bp, Artificial Sequence
  Description of Artificial Sequence: Synthetic oligonucleotide
  Target: LAMA2; (+) strand; PAM type: YTN; PAM sequence: TTG
ttgttgttcttttggagaga

SEQ ID NO: 411719 - DNA, 20 bp, Artificial Sequence
  Description of Artificial Sequence: Synthetic oligonucleotide
  Target: LAMA2; (+) strand; PAM type: YTN; PAM sequence: TTG
ttgttcttttggagagacag

SEQ ID NO: 411720 - DNA, 20 bp, Artificial Sequence
  Description of Artificial Sequence: Synthetic oligonucleotide
  Target: LAMA2; (+) strand; PAM type: YTN; PAM sequence: TTG
ttcttttggagagacagagg

SEQ ID NO: 411721 - DNA, 20 bp, Artificial Sequence
  Description of Artificial Sequence: Synthetic oligonucleotide
  Target: LAMA2; (+) strand; PAM type: YTN; PAM sequence: TTC
ttttggagagacagaggggg

SEQ ID NO: 411722 - DNA, 20 bp, Artificial Sequence
  Description of Artificial Sequence: Synthetic oligonucleotide
  Target: LAMA2; (+) strand; PAM type: YTN; PAM sequence: CTT
ttggagagacagaggggggc

SEQ ID NO: 411723 - DNA, 20 bp, Artificial Sequence
  Description of Artificial Sequence: Synthetic oligonucleotide
  Target: LAMA2; (+) strand; PAM type: YTN; PAM sequence: TTT
tggagagacagaggggggca

SEQ ID NO: 411724 - DNA, 20 bp, Artificial Sequence
  Description of Artificial Sequence: Synthetic oligonucleotide
  Target: LAMA2; (+) strand; PAM type: YTN; PAM sequence: TTT
ggagagacagaggggggcag

SEQ ID NO: 411725 - DNA, 20 bp, Artificial Sequence
  Description of Artificial Sequence: Synthetic oligonucleotide
  Target: LAMA2; (+) strand; PAM type: YTN; PAM sequence: TTG
gagagacagaggggggcagg

SEQ ID NO: 411726 - DNA, 20 bp, Artificial Sequence
  Description of Artificial Sequence: Synthetic oligonucleotide
  Target: LAMA2; (+) strand; PAM type: YTN; PAM sequence: CTC
actttgttgcccaggctggt

SEQ ID NO: 411727 - DNA, 20 bp, Artificial Sequence
  Description of Artificial Sequence: Synthetic oligonucleotide
  Target: LAMA2; (+) strand; PAM type: YTN; PAM sequence: CTT
tgttgcccaggctggtctca

SEQ ID NO: 411728 - DNA, 20 bp, Artificial Sequence
  Description of Artificial Sequence: Synthetic oligonucleotide
  Target: LAMA2; (+) strand; PAM type: YTN; PAM sequence: TTT
gttgcccaggctggtctcaa

SEQ ID NO: 411729 - DNA, 20 bp, Artificial Sequence
  Description of Artificial Sequence: Synthetic oligonucleotide
  Target: LAMA2; (+) strand; PAM type: YTN; PAM sequence: TTG
ttgcccaggctggtctcaaa

SEQ ID NO: 411730 - DNA, 20 bp, Artificial Sequence
  Description of Artificial Sequence: Synthetic oligonucleotide
  Target: LAMA2; (+) strand; PAM type: YTN; PAM sequence: TTG
cccaggctggtctcaaacta

SEQ ID NO: 411731 - DNA, 20 bp, Artificial Sequence
  Description of Artificial Sequence: Synthetic oligonucleotide
  Target: LAMA2; (+) strand; PAM type: YTN; PAM sequence: CTG
gtctcaaactactagcctca

SEQ ID NO: 411732 - DNA, 20 bp, Artificial Sequence
  Description of Artificial Sequence: Synthetic oligonucleotide
  Target: LAMA2; (+) strand; PAM type: YTN; PAM sequence: CTC
aaactactagcctcaagcga

SEQ ID NO: 411733 - DNA, 20 bp, Artificial Sequence
  Description of Artificial Sequence: Synthetic oligonucleotide
  Target: LAMA2; (+) strand; PAM type: YTN; PAM sequence: CTA
ctagcctcaagcgatcttcc

SEQ ID NO: 411734 - DNA, 20 bp, Artificial Sequence
  Description of Artificial Sequence: Synthetic oligonucleotide
  Target: LAMA2; (+) strand; PAM type: YTN; PAM sequence: CTA
gcctcaagcgatcttcctgc

SEQ ID NO: 411735 - DNA, 20 bp, Artificial Sequence
  Description of Artificial Sequence: Synthetic oligonucleotide
  Target: LAMA2; (+) strand; PAM type: YTN; PAM sequence: CTC
aagcgatcttcctgcctcgg

SEQ ID NO: 411736 - DNA, 20 bp, Artificial Sequence
  Description of Artificial Sequence: Synthetic oligonucleotide
  Target: LAMA2; (+) strand; PAM type: YTN; PAM sequence: CTT
cctgcctcggctttccaaat

SEQ ID NO: 411737 - DNA, 20 bp, Artificial Sequence
  Description of Artificial Sequence: Synthetic oligonucleotide
  Target: LAMA2; (+) strand; PAM type: YTN; PAM sequence: TTC
ctgcctcggctttccaaatg

SEQ ID NO: 411738 - DNA, 20 bp, Artificial Sequence
  Description of Artificial Sequence: Synthetic oligonucleotide
  Target: LAMA2; (+) strand; PAM type: YTN; PAM sequence: CTG
cctcggctttccaaatgctg

SEQ ID NO: 411739 - DNA, 20 bp, Artificial Sequence
  Description of Artificial Sequence: Synthetic oligonucleotide
  Target: LAMA2; (+) strand; PAM type: YTN; PAM sequence: CTC
ggctttccaaatgctgggat

SEQ ID NO: 411740 - DNA, 20 bp, Artificial Sequence
  Description of Artificial Sequence: Synthetic oligonucleotide
  Target: LAMA2; (+) strand; PAM type: YTN; PAM sequence: CTT
tccaaatgctgggattaaaa

SEQ ID NO: 411741 - DNA, 20 bp, Artificial Sequence
  Description of Artificial Sequence: Synthetic oligonucleotide
  Target: LAMA2; (+) strand; PAM type: YTN; PAM sequence: TTT
ccaaatgctgggattaaaaa

SEQ ID NO: 411742 - DNA, 20 bp, Artificial Sequence
  Description of Artificial Sequence: Synthetic oligonucleotide
  Target: LAMA2; (+) strand; PAM type: YTN; PAM sequence: TTC
caaatgctgggattaaaaac

SEQ ID NO: 411743 - DNA, 20 bp, Artificial Sequence
  Description of Artificial Sequence: Synthetic oligonucleotide
  Target: LAMA2; (+) strand; PAM type: YTN; PAM sequence: CTG
ggattaaaaacatgagccac

SEQ ID NO: 411744 - DNA, 20 bp, Artificial Sequence
  Description of Artificial Sequence: Synthetic oligonucleotide
  Target: LAMA2; (+) strand; PAM type: YTN; PAM sequence: TTA
aaaacatgagccaccacgcc

SEQ ID NO: 411745 - DNA, 20 bp, Artificial Sequence
  Description of Artificial Sequence: Synthetic oligonucleotide
  Target: LAMA2; (+) strand; PAM type: YTN; PAM sequence: CTT
acacccatcagacttggttt

SEQ ID NO: 411746 - DNA, 20 bp, Artificial Sequence
  Description of Artificial Sequence: Synthetic oligonucleotide
  Target: LAMA2; (+) strand; PAM type: YTN; PAM sequence: TTA
cacccatcagacttggtttc

SEQ ID NO: 411747 - DNA, 20 bp, Artificial Sequence
  Description of Artificial Sequence: Synthetic oligonucleotide
  Target: LAMA2; (+) strand; PAM type: YTN; PAM sequence: CTT
ggtttcagtttacccaagga

SEQ ID NO: 411748 - DNA, 20 bp, Artificial Sequence
  Description of Artificial Sequence: Synthetic oligonucleotide
  Target: LAMA2; (+) strand; PAM type: YTN; PAM sequence: TTG
gtttcagtttacccaaggaa

SEQ ID NO: 411749 - DNA, 20 bp, Artificial Sequence
  Description of Artificial Sequence: Synthetic oligonucleotide
  Target: LAMA2; (+) strand; PAM type: YTN; PAM sequence: TTT
cagtttacccaaggaaaagt

SEQ ID NO: 411750 - DNA, 20 bp, Artificial Sequence
  Description of Artificial Sequence: Synthetic oligonucleotide
  Target: LAMA2; (+) strand; PAM type: YTN; PAM sequence: TTC
agtttacccaaggaaaagtg

SEQ ID NO: 411751 - DNA, 20 bp, Artificial Sequence
  Description of Artificial Sequence: Synthetic oligonucleotide
  Target: LAMA2; (+) strand; PAM type: YTN; PAM sequence: TTT
acccaaggaaaagtgatgca

SEQ ID NO: 411752 - DNA, 20 bp, Artificial Sequence
  Description of Artificial Sequence: Synthetic oligonucleotide
  Target: LAMA2; (+) strand; PAM type: YTN; PAM sequence: TTA
cccaaggaaaagtgatgcaa

SEQ ID NO: 411753 - DNA, 20 bp, Artificial Sequence
  Description of Artificial Sequence: Synthetic oligonucleotide
  Target: LAMA2; (+) strand; PAM type: YTN; PAM sequence: CTT
taaccaagcaagggggaggt

SEQ ID NO: 411754 - DNA, 20 bp, Artificial Sequence
  Description of Artificial Sequence: Synthetic oligonucleotide
  Target: LAMA2; (+) strand; PAM type: YTN; PAM sequence: TTT
aaccaagcaagggggaggtc

SEQ ID NO: 411755 - DNA, 20 bp, Artificial Sequence
  Description of Artificial Sequence: Synthetic oligonucleotide
  Target: LAMA2; (+) strand; PAM type: YTN; PAM sequence: TTA
accaagcaagggggaggtcg

SEQ ID NO: 411756 - DNA, 20 bp, Artificial Sequence
  Description of Artificial Sequence: Synthetic oligonucleotide
  Target: LAMA2; (+) strand; PAM type: YTN; PAM sequence: TTT
gtacaaaacactaccaaatt

SEQ ID NO: 411757 - DNA, 20 bp, Artificial Sequence
  Description of Artificial Sequence: Synthetic oligonucleotide
  Target: LAMA2; (+) strand; PAM type: YTN; PAM sequence: TTG
tacaaaacactaccaaatta

SEQ ID NO: 411758 - DNA, 20 bp, Artificial Sequence
  Description of Artificial Sequence: Synthetic oligonucleotide
  Target: LAMA2; (+) strand; PAM type: YTN; PAM sequence: CTA
ccaaattagagggtggggaa

SEQ ID NO: 411759 - DNA, 20 bp, Artificial Sequence
  Description of Artificial Sequence: Synthetic oligonucleotide
  Target: LAMA2; (+) strand; PAM type: YTN; PAM sequence: TTA
gagggtggggaatttttgtc

SEQ ID NO: 411760 - DNA, 20 bp, Artificial Sequence
  Description of Artificial Sequence: Synthetic oligonucleotide
  Target: LAMA2; (+) strand; PAM type: YTN; PAM sequence: TTT
ttgtcccatttaaatcctaa

SEQ ID NO: 411761 - DNA, 20 bp, Artificial Sequence
  Description of Artificial Sequence: Synthetic oligonucleotide
  Target: LAMA2; (+) strand; PAM type: YTN; PAM sequence: TTT
tgtcccatttaaatcctaag

SEQ ID NO: 411762 - DNA, 20 bp, Artificial Sequence
  Description of Artificial Sequence: Synthetic oligonucleotide
  Target: LAMA2; (+) strand; PAM type: YTN; PAM sequence: TTT
gtcccatttaaatcctaagg

SEQ ID NO: 411763 - DNA, 20 bp, Artificial Sequence
  Description of Artificial Sequence: Synthetic oligonucleotide
  Target: LAMA2; (+) strand; PAM type: YTN; PAM sequence: TTG
tcccatttaaatcctaaggt

SEQ ID NO: 411764 - DNA, 20 bp, Artificial Sequence
  Description of Artificial Sequence: Synthetic oligonucleotide
  Target: LAMA2; (+) strand; PAM type: YTN; PAM sequence: TTT
aaatcctaaggtacatattt

SEQ ID NO: 411765 - DNA, 20 bp, Artificial Sequence
  Description of Artificial Sequence: Synthetic oligonucleotide
  Target: LAMA2; (+) strand; PAM type: YTN; PAM sequence: TTA
aatcctaaggtacatatttt

SEQ ID NO: 411766 - DNA, 20 bp, Artificial Sequence
  Description of Artificial Sequence: Synthetic oligonucleotide
  Target: LAMA2; (+) strand; PAM type: YTN; PAM sequence: CTA
aggtacatatttttaaaaac

SEQ ID NO: 411767 - DNA, 20 bp, Artificial Sequence
  Description of Artificial Sequence: Synthetic oligonucleotide
  Target: LAMA2; (+) strand; PAM type: YTN; PAM sequence: TTT
ttaaaaaccctcttacacca

SEQ ID NO: 411768 - DNA, 20 bp, Artificial Sequence
  Description of Artificial Sequence: Synthetic oligonucleotide
  Target: LAMA2; (+) strand; PAM type: YTN; PAM sequence: TTT
taaaaaccctcttacaccag

SEQ ID NO: 411769 - DNA, 20 bp, Artificial Sequence
  Description of Artificial Sequence: Synthetic oligonucleotide
  Target: LAMA2; (+) strand; PAM type: YTN; PAM sequence: TTT
aaaaaccctcttacaccagc

SEQ ID NO: 411770 - DNA, 20 bp, Artificial Sequence
  Description of Artificial Sequence: Synthetic oligonucleotide
  Target: LAMA2; (+) strand; PAM type: YTN; PAM sequence: TTA
aaaaccctcttacaccagca

SEQ ID NO: 411771 - DNA, 20 bp, Artificial Sequence
  Description of Artificial Sequence: Synthetic oligonucleotide
  Target: LAMA2; (+) strand; PAM type: YTN; PAM sequence: CTC
ttacaccagcacttctcagt

SEQ ID NO: 411772 - DNA, 20 bp, Artificial Sequence
  Description of Artificial Sequence: Synthetic oligonucleotide
  Target: LAMA2; (+) strand; PAM type: YTN; PAM sequence: CTT
acaccagcacttctcagtcc

SEQ ID NO: 411773 - DNA, 20 bp, Artificial Sequence
  Description of Artificial Sequence: Synthetic oligonucleotide
  Target: LAMA2; (+) strand; PAM type: YTN; PAM sequence: TTA
caccagcacttctcagtcct

SEQ ID NO: 411774 - DNA, 20 bp, Artificial Sequence
  Description of Artificial Sequence: Synthetic oligonucleotide
  Target: LAMA2; (+) strand; PAM type: YTN; PAM sequence: CTT
ctcagtccttttccaactgc

SEQ ID NO: 411775 - DNA, 20 bp, Artificial Sequence
  Description of Artificial Sequence: Synthetic oligonucleotide
  Target: LAMA2; (+) strand; PAM type: YTN; PAM sequence: TTC
tcagtccttttccaactgcc

SEQ ID NO: 411776 - DNA, 20 bp, Artificial Sequence
  Description of Artificial Sequence: Synthetic oligonucleotide
  Target: LAMA2; (+) strand; PAM type: YTN; PAM sequence: CTC
agtccttttccaactgccag

SEQ ID NO: 411777 - DNA, 20 bp, Artificial Sequence
  Description of Artificial Sequence: Synthetic oligonucleotide
  Target: LAMA2; (+) strand; PAM type: YTN; PAM sequence: CTT
ttccaactgccagtttaata

SEQ ID NO: 411778 - DNA, 20 bp, Artificial Sequence
  Description of Artificial Sequence: Synthetic oligonucleotide
  Target: LAMA2; (+) strand; PAM type: YTN; PAM sequence: TTT
tccaactgccagtttaataa

SEQ ID NO: 411779 - DNA, 20 bp, Artificial Sequence
  Description of Artificial Sequence: Synthetic oligonucleotide
  Target: LAMA2; (+) strand; PAM type: YTN; PAM sequence: TTT
ccaactgccagtttaataaa

SEQ ID NO: 411780 - DNA, 20 bp, Artificial Sequence
  Description of Artificial Sequence: Synthetic oligonucleotide
  Target: LAMA2; (+) strand; PAM type: YTN; PAM sequence: TTC
caactgccagtttaataaag

SEQ ID NO: 411781 - DNA, 20 bp, Artificial Sequence
  Description of Artificial Sequence: Synthetic oligonucleotide
  Target: LAMA2; (+) strand; PAM type: YTN; PAM sequence: CTG
ccagtttaataaaggaaggt

SEQ ID NO: 411782 - DNA, 20 bp, Artificial Sequence
  Description of Artificial Sequence: Synthetic oligonucleotide
  Target: LAMA2; (+) strand; PAM type: YTN; PAM sequence: TTT
aataaaggaaggtgatagaa

SEQ ID NO: 411783 - DNA, 20 bp, Artificial Sequence
  Description of Artificial Sequence: Synthetic oligonucleotide
  Target: LAMA2; (+) strand; PAM type: YTN; PAM sequence: TTA
ataaaggaaggtgatagaag

SEQ ID NO: 411784 - DNA, 20 bp, Artificial Sequence
  Description of Artificial Sequence: Synthetic oligonucleotide
  Target: LAMA2; (+) strand; PAM type: YTN; PAM sequence: TTT
tattaaaacagtatccatcc

SEQ ID NO: 411785 - DNA, 20 bp, Artificial Sequence
  Description of Artificial Sequence: Synthetic oligonucleotide
  Target: LAMA2; (+) strand; PAM type: YTN; PAM sequence: TTT
attaaaacagtatccatcct

SEQ ID NO: 411786 - DNA, 20 bp, Artificial Sequence
  Description of Artificial Sequence: Synthetic oligonucleotide
  Target: LAMA2; (+) strand; PAM type: YTN; PAM sequence: TTA
ttaaaacagtatccatcctg

SEQ ID NO: 411787 - DNA, 20 bp, Artificial Sequence
  Description of Artificial Sequence: Synthetic oligonucleotide
  Target: LAMA2; (+) strand; PAM type: YTN; PAM sequence: TTA
aaacagtatccatcctgttg

SEQ ID NO: 411788 - DNA, 20 bp, Artificial Sequence
  Description of Artificial Sequence: Synthetic oligonucleotide
  Target: LAMA2; (+) strand; PAM type: YTN; PAM sequence: CTG
ttgcaaatcaatgattgata

SEQ ID NO: 411789 - DNA, 20 bp, Artificial Sequence
  Description of Artificial Sequence: Synthetic oligonucleotide
  Target: LAMA2; (+) strand; PAM type: YTN; PAM sequence: TTG
caaatcaatgattgatagta

SEQ ID NO: 411790 - DNA, 20 bp, Artificial Sequence
  Description of Artificial Sequence: Synthetic oligonucleotide
  Target: LAMA2; (+) strand; PAM type: YTN; PAM sequence: TTG
atagtaaacatcaccttgga

SEQ ID NO: 411791 - DNA, 20 bp, Artificial Sequence
  Description of Artificial Sequence: Synthetic oligonucleotide
  Target: LAMA2; (+) strand; PAM type: YTN; PAM sequence: CTT
ggatgtccttaaaaacaaag

SEQ ID NO: 411792 - DNA, 20 bp, Artificial Sequence
  Description of Artificial Sequence: Synthetic oligonucleotide
  Target: LAMA2; (+) strand; PAM type: YTN; PAM sequence: TTG
gatgtccttaaaaacaaagg

SEQ ID NO: 411793 - DNA, 20 bp, Artificial Sequence
  Description of Artificial Sequence: Synthetic oligonucleotide
  Target: LAMA2; (+) strand; PAM type: YTN; PAM sequence: CTT
aaaaacaaaggactatacac

SEQ ID NO: 411794 - DNA, 20 bp, Artificial Sequence
  Description of Artificial Sequence: Synthetic oligonucleotide
  Target: LAMA2; (+) strand; PAM type: YTN; PAM sequence: TTA
aaaacaaaggactatacacc

SEQ ID NO: 411795 - DNA, 20 bp, Artificial Sequence
  Description of Artificial Sequence: Synthetic oligonucleotide
  Target: LAMA2; (+) strand; PAM type: YTN; PAM sequence: CTA
tacaccataatggctttaaa

SEQ ID NO: 411796 - DNA, 20 bp, Artificial Sequence
  Description of Artificial Sequence: Synthetic oligonucleotide
  Target: LAMA2; (+) strand; PAM type: YTN; PAM sequence: CTT
taaactttgaggttacatgt

SEQ ID NO: 411797 - DNA, 20 bp, Artificial Sequence
  Description of Artificial Sequence: Synthetic oligonucleotide
  Target: LAMA2; (+) strand; PAM type: YTN; PAM sequence: TTT
aaactttgaggttacatgtt

SEQ ID NO: 411798 - DNA, 20 bp, Artificial Sequence
  Description of Artificial Sequence: Synthetic oligonucleotide
  Target: LAMA2; (+) strand; PAM type: YTN; PAM sequence: TTA
aactttgaggttacatgtta

SEQ ID NO: 411799 - DNA, 20 bp, Artificial Sequence
  Description of Artificial Sequence: Synthetic oligonucleotide
  Target: LAMA2; (+) strand; PAM type: YTN; PAM sequence: CTT
tgaggttacatgttagagtg

SEQ ID NO: 411800 - DNA, 20 bp, Artificial Sequence
  Description of Artificial Sequence: Synthetic oligonucleotide
  Target: LAMA2; (+) strand; PAM type: YTN; PAM sequence: TTT
gaggttacatgttagagtga

SEQ ID NO: 411801 - DNA, 20 bp, Artificial Sequence
  Description of Artificial Sequence: Synthetic oligonucleotide
  Target: LAMA2; (+) strand; PAM type: YTN; PAM sequence: TTG
aggttacatgttagagtgat

SEQ ID NO: 411802 - DNA, 20 bp, Artificial Sequence
  Description of Artificial Sequence: Synthetic oligonucleotide
  Target: LAMA2; (+) strand; PAM type: YTN; PAM sequence: TTA
catgttagagtgatcagttt

SEQ ID NO: 411803 - DNA, 20 bp, Artificial Sequence
  Description of Artificial Sequence: Synthetic oligonucleotide
  Target: LAMA2; (+) strand; PAM type: YTN; PAM sequence: TTA
gagtgatcagtttggtacaa

SEQ ID NO: 411804 - DNA, 20 bp, Artificial Sequence
  Description of Artificial Sequence: Synthetic oligonucleotide
  Target: LAMA2; (+) strand; PAM type: YTN; PAM sequence: TTT
ggtacaactcttttccataa

SEQ ID NO: 411805 - DNA, 20 bp, Artificial Sequence
  Description of Artificial Sequence: Synthetic oligonucleotide
  Target: LAMA2; (+) strand; PAM type: YTN; PAM sequence: TTG
gtacaactcttttccataac

SEQ ID NO: 411806 - DNA, 20 bp, Artificial Sequence
  Description of Artificial Sequence: Synthetic oligonucleotide
  Target: LAMA2; (+) strand; PAM type: YTN; PAM sequence: CTC
ttttccataacattggctca

SEQ ID NO: 411807 - DNA, 20 bp, Artificial Sequence
  Description of Artificial Sequence: Synthetic oligonucleotide
  Target: LAMA2; (+) strand; PAM type: YTN; PAM sequence: CTT
ttccataacattggctcatc

SEQ ID NO: 411808 - DNA, 20 bp, Artificial Sequence
  Description of Artificial Sequence: Synthetic oligonucleotide
  Target: LAMA2; (+) strand; PAM type: YTN; PAM sequence: TTT
tccataacattggctcatct

SEQ ID NO: 411809 - DNA, 20 bp, Artificial Sequence
  Description of Artificial Sequence: Synthetic oligonucleotide
  Target: LAMA2; (+) strand; PAM type: YTN; PAM sequence: TTT
ccataacattggctcatctg

SEQ ID NO: 411810 - DNA, 20 bp, Artificial Sequence
  Description of Artificial Sequence: Synthetic oligonucleotide
  Target: LAMA2; (+) strand; PAM type: YTN; PAM sequence: TTC
cataacattggctcatctga

SEQ ID NO: 411811 - DNA, 20 bp, Artificial Sequence
  Description of Artificial Sequence: Synthetic oligonucleotide
  Target: LAMA2; (+) strand; PAM type: YTN; PAM sequence: TTG
gctcatctgagaataccgtt

SEQ ID NO: 411812 - DNA, 20 bp, Artificial Sequence
  Description of Artificial Sequence: Synthetic oligonucleotide
  Target: LAMA2; (+) strand; PAM type: YTN; PAM sequence: CTC
atctgagaataccgttttat

SEQ ID NO: 411813 - DNA, 20 bp, Artificial Sequence
  Description of Artificial Sequence: Synthetic oligonucleotide
  Target: LAMA2; (+) strand; PAM type: YTN; PAM sequence: CTG
agaataccgttttattaagc

SEQ ID NO: 411814 - DNA, 20 bp, Artificial Sequence
  Description of Artificial Sequence: Synthetic oligonucleotide
  Target: LAMA2; (+) strand; PAM type: YTN; PAM sequence: TTT
tattaagcactgcttctgcc

SEQ ID NO: 411815 - DNA, 20 bp, Artificial Sequence
  Description of Artificial Sequence: Synthetic oligonucleotide
  Target: LAMA2; (+) strand; PAM type: YTN; PAM sequence: TTT
attaagcactgcttctgcct

SEQ ID NO: 411816 - DNA, 20 bp, Artificial Sequence
  Description of Artificial Sequence: Synthetic oligonucleotide
  Target: LAMA2; (+) strand; PAM type: YTN; PAM sequence: TTA
ttaagcactgcttctgcctg

SEQ ID NO: 411817 - DNA, 20 bp, Artificial Sequence
  Description of Artificial Sequence: Synthetic oligonucleotide
  Target: LAMA2; (+) strand; PAM type: YTN; PAM sequence: TTA
agcactgcttctgcctgctt

SEQ ID NO: 411818 - DNA, 20 bp, Artificial Sequence
  Description of Artificial Sequence: Synthetic oligonucleotide
  Target: LAMA2; (+) strand; PAM type: YTN; PAM sequence: CTG
cttctgcctgcttcttgagg

SEQ ID NO: 411819 - DNA, 20 bp, Artificial Sequence
  Description of Artificial Sequence: Synthetic oligonucleotide
  Target: LAMA2; (+) strand; PAM type: YTN; PAM sequence: CTT
ctgcctgcttcttgagggct

SEQ ID NO: 411820 - DNA, 20 bp, Artificial Sequence
  Description of Artificial Sequence: Synthetic oligonucleotide
  Target: LAMA2; (+) strand; PAM type: YTN; PAM sequence: TTC
tgcctgcttcttgagggctg

SEQ ID NO: 411821 - DNA, 20 bp, Artificial Sequence
  Description of Artificial Sequence: Synthetic oligonucleotide
  Target: LAMA2; (+) strand; PAM type: YTN; PAM sequence: CTG
cctgcttcttgagggctgcc

SEQ ID NO: 411822 - DNA, 20 bp, Artificial Sequence
  Description of Artificial Sequence: Synthetic oligonucleotide
  Target: LAMA2; (+) strand; PAM type: YTN; PAM sequence: CTG
cttcttgagggctgcccgtt

SEQ ID NO: 411823 - DNA, 20 bp, Artificial Sequence
  Description of Artificial Sequence: Synthetic oligonucleotide
  Target: LAMA2; (+) strand; PAM type: YTN; PAM sequence: CTT
cttgagggctgcccgttgca

SEQ ID NO: 411824 - DNA, 20 bp, Artificial Sequence
  Description of Artificial Sequence: Synthetic oligonucleotide
  Target: LAMA2; (+) strand; PAM type: YTN; PAM sequence: TTC
ttgagggctgcccgttgcag

SEQ ID NO: 411825 - DNA, 20 bp, Artificial Sequence
  Description of Artificial Sequence: Synthetic oligonucleotide
  Target: LAMA2; (+) strand; PAM type: YTN; PAM sequence: CTT
gagggctgcccgttgcagaa

SEQ ID NO: 411826 - DNA, 20 bp, Artificial Sequence
  Description of Artificial Sequence: Synthetic oligonucleotide
  Target: LAMA2; (+) strand; PAM type: YTN; PAM sequence: TTG
agggctgcccgttgcagaaa

SEQ ID NO: 411827 - DNA, 20 bp, Artificial Sequence
  Description of Artificial Sequence: Synthetic oligonucleotide
  Target: LAMA2; (+) strand; PAM type: YTN; PAM sequence: CTG
cccgttgcagaaacggagga

SEQ ID NO: 411828 - DNA, 20 bp, Artificial Sequence
  Description of Artificial Sequence: Synthetic oligonucleotide
  Target: LAMA2; (+) strand; PAM type: YTN; PAM sequence: TTG
cagaaacggaggatctaatc

SEQ ID NO: 411829 - DNA, 20 bp, Artificial Sequence
  Description of Artificial Sequence: Synthetic oligonucleotide
  Target: LAMA2; (+) strand; PAM type: YTN; PAM sequence: CTA
atccaggaggtgttcttctt

SEQ ID NO: 411830 - DNA, 20 bp, Artificial Sequence
  Description of Artificial Sequence: Synthetic oligonucleotide
  Target: LAMA2; (+) strand; PAM type: YTN; PAM sequence: TTC
ttcttcctaaatttcaagtg

SEQ ID NO: 411831 - DNA, 20 bp, Artificial Sequence
  Description of Artificial Sequence: Synthetic oligonucleotide
  Target: LAMA2; (+) strand; PAM type: YTN; PAM sequence: CTT
cttcctaaatttcaagtgga

SEQ ID NO: 411832 - DNA, 20 bp, Artificial Sequence
  Description of Artificial Sequence: Synthetic oligonucleotide
  Target: LAMA2; (+) strand; PAM type: YTN; PAM sequence: TTC
ttcctaaatttcaagtggat

SEQ ID NO: 411833 - DNA, 20 bp, Artificial Sequence
  Description of Artificial Sequence: Synthetic oligonucleotide
  Target: LAMA2; (+) strand; PAM type: YTN; PAM sequence: CTT
cctaaatttcaagtggatgt

SEQ ID NO: 411834 - DNA, 20 bp, Artificial Sequence
  Description of Artificial Sequence: Synthetic oligonucleotide
  Target: LAMA2; (+) strand; PAM type: YTN; PAM sequence: TTC
ctaaatttcaagtggatgta

SEQ ID NO: 411835 - DNA, 20 bp, Artificial Sequence
  Description of Artificial Sequence: Synthetic oligonucleotide
  Target: LAMA2; (+) strand; PAM type: YTN; PAM sequence: CTA
aatttcaagtggatgtaacc

SEQ ID NO: 411836 - DNA, 20 bp, Artificial Sequence
  Description of Artificial Sequence: Synthetic oligonucleotide
  Target: LAMA2; (+) strand; PAM type: YTN; PAM sequence: TTT
caagtggatgtaacctgtaa

SEQ ID NO: 411837 - DNA, 20 bp, Artificial Sequence
  Description of Artificial Sequence: Synthetic oligonucleotide
  Target: LAMA2; (+) strand; PAM type: YTN; PAM sequence: TTC
aagtggatgtaacctgtaat

SEQ ID NO: 411838 - DNA, 20 bp, Artificial Sequence
  Description of Artificial Sequence: Synthetic oligonucleotide
  Target: LAMA2; (+) strand; PAM type: YTN; PAM sequence: CTG
taatgattcttaaaagaact

SEQ ID NO: 411839 - DNA, 20 bp, Artificial Sequence
  Description of Artificial Sequence: Synthetic oligonucleotide
  Target: LAMA2; (+) strand; PAM type: YTN; PAM sequence: TTC
ttaaaagaactttgacaaag

SEQ ID NO: 411840 - DNA, 20 bp, Artificial Sequence
  Description of Artificial Sequence: Synthetic oligonucleotide
  Target: LAMA2; (+) strand; PAM type: YTN; PAM sequence: CTT
aaaagaactttgacaaagtc

SEQ ID NO: 411841 - DNA, 20 bp, Artificial Sequence
  Description of Artificial Sequence: Synthetic oligonucleotide
  Target: LAMA2; (+) strand; PAM type: YTN; PAM sequence: TTA
aaagaactttgacaaagtcc

SEQ ID NO: 411842 - DNA, 20 bp, Artificial Sequence
  Description of Artificial Sequence: Synthetic oligonucleotide
  Target: LAMA2; (+) strand; PAM type: YTN; PAM sequence: CTT
tgacaaagtccctgtccttt

SEQ ID NO: 411843 - DNA, 20 bp, Artificial Sequence
  Description of Artificial Sequence: Synthetic oligonucleotide
  Target: LAMA2; (+) strand; PAM type: YTN; PAM sequence: TTT
gacaaagtccctgtcctttt

SEQ ID NO: 411844 - DNA, 20 bp, Artificial Sequence
  Description of Artificial Sequence: Synthetic oligonucleotide
  Target: LAMA2; (+) strand; PAM type: YTN; PAM sequence: TTG
acaaagtccctgtccttttc

SEQ ID NO: 411845 - DNA, 20 bp, Artificial Sequence
  Description of Artificial Sequence: Synthetic oligonucleotide
  Target: LAMA2; (+) strand; PAM type: YTN; PAM sequence: CTG
tccttttctggtcaaaggtt

SEQ ID NO: 411846 - DNA, 20 bp, Artificial Sequence
  Description of Artificial Sequence: Synthetic oligonucleotide
  Target: LAMA2; (+) strand; PAM type: YTN; PAM sequence: CTT
ttctggtcaaaggttttttt

SEQ ID NO: 411847 - DNA, 20 bp, Artificial Sequence
  Description of Artificial Sequence: Synthetic oligonucleotide
  Target: LAMA2; (+) strand; PAM type: YTN; PAM sequence: TTT
tctggtcaaaggtttttttc

SEQ ID NO: 411848 - DNA, 20 bp, Artificial Sequence
  Description of Artificial Sequence: Synthetic oligonucleotide
  Target: LAMA2; (+) strand; PAM type: YTN; PAM sequence: TTT
ctggtcaaaggtttttttct

SEQ ID NO: 411849 - DNA, 20 bp, Artificial Sequence
  Description of Artificial Sequence: Synthetic oligonucleotide
  Target: LAMA2; (+) strand; PAM type: YTN; PAM sequence: TTC
tggtcaaaggtttttttcta

SEQ ID NO: 411850 - DNA, 20 bp, Artificial Sequence
  Description of Artificial Sequence: Synthetic oligonucleotide
  Target: LAMA2; (+) strand; PAM type: YTN; PAM sequence: CTG
gtcaaaggtttttttctaaa

SEQ ID NO: 411851 - DNA, 20 bp, Artificial Sequence
  Description of Artificial Sequence: Synthetic oligonucleotide
  Target: LAMA2; (+) strand; PAM type: YTN; PAM sequence: TTT
ttttctaaaatggcttgacc

SEQ ID NO: 411852 - DNA, 20 bp, Artificial Sequence
  Description of Artificial Sequence: Synthetic oligonucleotide
  Target: LAMA2; (+) strand; PAM type: YTN; PAM sequence: TTT
tttctaaaatggcttgacca

SEQ ID NO: 411853 - DNA, 20 bp, Artificial Sequence
  Description of Artificial Sequence: Synthetic oligonucleotide
  Target: LAMA2; (+) strand; PAM type: YTN; PAM sequence: TTT
ttctaaaatggcttgaccag

SEQ ID NO: 411854 - DNA, 20 bp, Artificial Sequence
  Description of Artificial Sequence: Synthetic oligonucleotide
  Target: LAMA2; (+) strand; PAM type: YTN; PAM sequence: TTT
tctaaaatggcttgaccagt

SEQ ID NO: 411855 - DNA, 20 bp, Artificial Sequence
  Description of Artificial Sequence: Synthetic oligonucleotide
  Target: LAMA2; (+) strand; PAM type: YTN; PAM sequence: TTT
ctaaaatggcttgaccagtg

SEQ ID NO: 411856 - DNA, 20 bp, Artificial Sequence
  Description of Artificial Sequence: Synthetic oligonucleotide
  Target: LAMA2; (+) strand; PAM type: YTN; PAM sequence: TTC
taaaatggcttgaccagtgc

SEQ ID NO: 411857 - DNA, 20 bp, Artificial Sequence
  Description of Artificial Sequence: Synthetic oligonucleotide
  Target: LAMA2; (+) strand; PAM type: YTN; PAM sequence: CTA
aaatggcttgaccagtgcct

SEQ ID NO: 411858 - DNA, 20 bp, Artificial Sequence
  Description of Artificial Sequence: Synthetic oligonucleotide
  Target: LAMA2; (+) strand; PAM type: YTN; PAM sequence: CTT
gaccagtgccttgtccatct

SEQ ID NO: 411859 - DNA, 20 bp, Artificial Sequence
  Description of Artificial Sequence: Synthetic oligonucleotide
  Target: LAMA2; (+) strand; PAM type: YTN; PAM sequence: TTG
accagtgccttgtccatcta

SEQ ID NO: 411860 - DNA, 20 bp, Artificial Sequence
  Description of Artificial Sequence: Synthetic oligonucleotide
  Target: LAMA2; (+) strand; PAM type: YTN; PAM sequence: CTT
gtccatctagaaaatctcat

SEQ ID NO: 411861 - DNA, 20 bp, Artificial Sequence
  Description of Artificial Sequence: Synthetic oligonucleotide
  Target: LAMA2; (+) strand; PAM type: YTN; PAM sequence: TTG
tccatctagaaaatctcata

SEQ ID NO: 411862 - DNA, 20 bp, Artificial Sequence
  Description of Artificial Sequence: Synthetic oligonucleotide
  Target: LAMA2; (+) strand; PAM type: YTN; PAM sequence: CTA
gaaaatctcatagtatacaa

SEQ ID NO: 411863 - DNA, 20 bp, Artificial Sequence
  Description of Artificial Sequence: Synthetic oligonucleotide
  Target: LAMA2; (+) strand; PAM type: YTN; PAM sequence: CTC
atagtatacaacgaaacaac

SEQ ID NO: 411864 - DNA, 20 bp, Artificial Sequence
  Description of Artificial Sequence: Synthetic oligonucleotide
  Target: LAMA2; (+) strand; PAM type: YTN; PAM sequence: CTG
ctgcttagctcaggaccagt

SEQ ID NO: 411865 - DNA, 20 bp, Artificial Sequence
  Description of Artificial Sequence: Synthetic oligonucleotide
  Target: LAMA2; (+) strand; PAM type: YTN; PAM sequence: CTG
cttagctcaggaccagtttt

SEQ ID NO: 411866 - DNA, 20 bp, Artificial Sequence
  Description of Artificial Sequence: Synthetic oligonucleotide
  Target: LAMA2; (+) strand; PAM type: YTN; PAM sequence: CTT
agctcaggaccagttttgga

SEQ ID NO: 411867 - DNA, 20 bp, Artificial Sequence
  Description of Artificial Sequence: Synthetic oligonucleotide
  Target: LAMA2; (+) strand; PAM type: YTN; PAM sequence: TTA
gctcaggaccagttttggat

SEQ ID NO: 411868 - DNA, 20 bp, Artificial Sequence
  Description of Artificial Sequence: Synthetic oligonucleotide
  Target: LAMA2; (+) strand; PAM type: YTN; PAM sequence: CTC
aggaccagttttggatacac

SEQ ID NO: 411869 - DNA, 20 bp, Artificial Sequence
  Description of Artificial Sequence: Synthetic oligonucleotide
  Target: LAMA2; (+) strand; PAM type: YTN; PAM sequence: TTT
tggatacacctgtccagtct

SEQ ID NO: 411870 - DNA, 20 bp, Artificial Sequence
  Description of Artificial Sequence: Synthetic oligonucleotide
  Target: LAMA2; (+) strand; PAM type: YTN; PAM sequence: TTT
ggatacacctgtccagtcta

SEQ ID NO: 411871 - DNA, 20 bp, Artificial Sequence
  Description of Artificial Sequence: Synthetic oligonucleotide
  Target: LAMA2; (+) strand; PAM type: YTN; PAM sequence: TTG
gatacacctgtccagtctac

SEQ ID NO: 411872 - DNA, 20 bp, Artificial Sequence
  Description of Artificial Sequence: Synthetic oligonucleotide
  Target: LAMA2; (+) strand; PAM type: YTN; PAM sequence: CTG
tccagtctaccagcaatcca

SEQ ID NO: 411873 - DNA, 20 bp, Artificial Sequence
  Description of Artificial Sequence: Synthetic oligonucleotide
  Target: LAMA2; (+) strand; PAM type: YTN; PAM sequence: CTA
ccagcaatccaaaagttccc

SEQ ID NO: 411874 - DNA, 20 bp, Artificial Sequence
  Description of Artificial Sequence: Synthetic oligonucleotide
  Target: LAMA2; (+) strand; PAM type: YTN; PAM sequence: TTC
cccataacatacagctgcta

SEQ ID NO: 411875 - DNA, 20 bp, Artificial Sequence
  Description of Artificial Sequence: Synthetic oligonucleotide
  Target: LAMA2; (+) strand; PAM type: YTN; PAM sequence: CTG
ctaccgggagtgtacaactg

SEQ ID NO: 411876 - DNA, 20 bp, Artificial Sequence
  Description of Artificial Sequence: Synthetic oligonucleotide
  Target: LAMA2; (+) strand; PAM type: YTN; PAM sequence: CTA
ccgggagtgtacaactgcca

SEQ ID NO: 411877 - DNA, 20 bp, Artificial Sequence
  Description of Artificial Sequence: Synthetic oligonucleotide
  Target: LAMA2; (+) strand; PAM type: YTN; PAM sequence: CTG
ccaccttgaaaattttttaa

SEQ ID NO: 411878 - DNA, 20 bp, Artificial Sequence
  Description of Artificial Sequence: Synthetic oligonucleotide
  Target: LAMA2; (+) strand; PAM type: YTN; PAM sequence: CTT
gaaaattttttaaattttaa

SEQ ID NO: 411879 - DNA, 20 bp, Artificial Sequence
  Description of Artificial Sequence: Synthetic oligonucleotide
  Target: LAMA2; (+) strand; PAM type: YTN; PAM sequence: TTG
aaaattttttaaattttaat

SEQ ID NO: 411880 - DNA, 20 bp, Artificial Sequence
  Description of Artificial Sequence: Synthetic oligonucleotide
  Target: LAMA2; (+) strand; PAM type: YTN; PAM sequence: TTT
tttaaattttaatagagaag

SEQ ID NO: 411881 - DNA, 20 bp, Artificial Sequence
  Description of Artificial Sequence: Synthetic oligonucleotide
  Target: LAMA2; (+) strand; PAM type: YTN; PAM sequence: TTT
ttaaattttaatagagaagt

SEQ ID NO: 411882 - DNA, 20 bp, Artificial Sequence
  Description of Artificial Sequence: Synthetic oligonucleotide
  Target: LAMA2; (+) strand; PAM type: YTN; PAM sequence: TTT
taaattttaatagagaagtt

SEQ ID NO: 411883 - DNA, 20 bp, Artificial Sequence
  Description of Artificial Sequence: Synthetic oligonucleotide
  Target: LAMA2; (+) strand; PAM type: YTN; PAM sequence: TTT
aaattttaatagagaagtta

SEQ ID NO: 411884 - DNA, 20 bp, Artificial Sequence
  Description of Artificial Sequence: Synthetic oligonucleotide
  Target: LAMA2; (+) strand; PAM type: YTN; PAM sequence: TTA
aattttaatagagaagttat

SEQ ID NO: 411885 - DNA, 20 bp, Artificial Sequence
  Description of Artificial Sequence: Synthetic oligonucleotide
  Target: LAMA2; (+) strand; PAM type: YTN; PAM sequence: TTT
taatagagaagttatattga

SEQ ID NO: 411886 - DNA, 20 bp, Artificial Sequence
  Description of Artificial Sequence: Synthetic oligonucleotide
  Target: LAMA2; (+) strand; PAM type: YTN; PAM sequence: TTT
aatagagaagttatattgac

SEQ ID NO: 411887 - DNA, 20 bp, Artificial Sequence
  Description of Artificial Sequence: Synthetic oligonucleotide
  Target: LAMA2; (+) strand; PAM type: YTN; PAM sequence: TTA
atagagaagttatattgaca

SEQ ID NO: 411888 - DNA, 20 bp, Artificial Sequence
  Description of Artificial Sequence: Synthetic oligonucleotide
  Target: LAMA2; (+) strand; PAM type: YTN; PAM sequence: TTA
tattgacatttacatatagt

SEQ ID NO: 411889 - DNA, 20 bp, Artificial Sequence
  Description of Artificial Sequence: Synthetic oligonucleotide
  Target: LAMA2; (+) strand; PAM type: YTN; PAM sequence: TTG
acatttacatatagtaatta

SEQ ID NO: 411890 - DNA, 20 bp, Artificial Sequence
  Description of Artificial Sequence: Synthetic oligonucleotide
  Target: LAMA2; (+) strand; PAM type: YTN; PAM sequence: TTT
acatatagtaattagacgag

SEQ ID NO: 411891 - DNA, 20 bp, Artificial Sequence
  Description of Artificial Sequence: Synthetic oligonucleotide
  Target: LAMA2; (+) strand; PAM type: YTN; PAM sequence: TTA
catatagtaattagacgagt

SEQ ID NO: 411892 - DNA, 20 bp, Artificial Sequence
  Description of Artificial Sequence: Synthetic oligonucleotide
  Target: LAMA2; (+) strand; PAM type: YTN; PAM sequence: TTA
gacgagtgactgtaaccgca

SEQ ID NO: 411893 - DNA, 20 bp, Artificial Sequence
  Description of Artificial Sequence: Synthetic oligonucleotide
  Target: LAMA2; (+) strand; PAM type: YTN; PAM sequence: CTG
taaccgcaataatatggaca

SEQ ID NO: 411894 - DNA, 20 bp, Artificial Sequence
  Description of Artificial Sequence: Synthetic oligonucleotide
  Target: LAMA2; (+) strand; PAM type: YTN; PAM sequence: CTG
gtggttctcttttaagctac

SEQ ID NO: 411895 - DNA, 20 bp, Artificial Sequence
  Description of Artificial Sequence: Synthetic oligonucleotide
  Target: LAMA2; (+) strand; PAM type: YTN; PAM sequence: TTC
tcttttaagctacatgtaat

SEQ ID NO: 411896 - DNA, 20 bp, Artificial Sequence
  Description of Artificial Sequence: Synthetic oligonucleotide
  Target: LAMA2; (+) strand; PAM type: YTN; PAM sequence: CTC
ttttaagctacatgtaattg

SEQ ID NO: 411897 - DNA, 20 bp, Artificial Sequence
  Description of Artificial Sequence: Synthetic oligonucleotide
  Target: LAMA2; (+) strand; PAM type: YTN; PAM sequence: CTT
ttaagctacatgtaattgtt

SEQ ID NO: 411898 - DNA, 20 bp, Artificial Sequence
  Description of Artificial Sequence: Synthetic oligonucleotide
  Target: LAMA2; (+) strand; PAM type: YTN; PAM sequence: TTT
taagctacatgtaattgttt

SEQ ID NO: 411899 - DNA, 20 bp, Artificial Sequence
  Description of Artificial Sequence: Synthetic oligonucleotide
  Target: LAMA2; (+) strand; PAM type: YTN; PAM sequence: TTT
aagctacatgtaattgtttc

SEQ ID NO: 411900 - DNA, 20 bp, Artificial Sequence
  Description of Artificial Sequence: Synthetic oligonucleotide
  Target: LAMA2; (+) strand; PAM type: YTN; PAM sequence: TTA
agctacatgtaattgtttcc

SEQ ID NO: 411901 - DNA, 20 bp, Artificial Sequence
  Description of Artificial Sequence: Synthetic oligonucleotide
  Target: LAMA2; (+) strand; PAM type: YTN; PAM sequence: CTA
catgtaattgtttcctaatt

SEQ ID NO: 411902 - DNA, 20 bp, Artificial Sequence
  Description of Artificial Sequence: Synthetic oligonucleotide
  Target: LAMA2; (+) strand; PAM type: YTN; PAM sequence: TTG
tttcctaattcctcagcatc

SEQ ID NO: 411903 - DNA, 20 bp, Artificial Sequence
  Description of Artificial Sequence: Synthetic oligonucleotide
  Target: LAMA2; (+) strand; PAM type: YTN; PAM sequence: TTT
cctaattcctcagcatccat

SEQ ID NO: 411904 - DNA, 20 bp, Artificial Sequence
  Description of Artificial Sequence: Synthetic oligonucleotide
  Target: LAMA2; (+) strand; PAM type: YTN; PAM sequence: TTC
ctaattcctcagcatccatc

SEQ ID NO: 411905 - DNA, 20 bp, Artificial Sequence
  Description of Artificial Sequence: Synthetic oligonucleotide
  Target: LAMA2; (+) strand; PAM type: YTN; PAM sequence: CTA
attcctcagcatccatccac

SEQ ID NO: 411906 - DNA, 20 bp, Artificial Sequence
  Description of Artificial Sequence: Synthetic oligonucleotide
  Target: LAMA2; (+) strand; PAM type: YTN; PAM sequence: TTC
ctcagcatccatccaccttt

SEQ ID NO: 411907 - DNA, 20 bp, Artificial Sequence
  Description of Artificial Sequence: Synthetic oligonucleotide
  Target: LAMA2; (+) strand; PAM type: YTN; PAM sequence: CTC
agcatccatccacctttctt

SEQ ID NO: 411908 - DNA, 20 bp, Artificial Sequence
  Description of Artificial Sequence: Synthetic oligonucleotide
  Target: LAMA2; (+) strand; PAM type: YTN; PAM sequence: CTT
tcttaatccctcaattttca

SEQ ID NO: 411909 - DNA, 20 bp, Artificial Sequence
  Description of Artificial Sequence: Synthetic oligonucleotide
  Target: LAMA2; (+) strand; PAM type: YTN; PAM sequence: TTT
cttaatccctcaattttcag

SEQ ID NO: 411910 - DNA, 20 bp, Artificial Sequence
  Description of Artificial Sequence: Synthetic oligonucleotide
  Target: LAMA2; (+) strand; PAM type: YTN; PAM sequence: TTC
ttaatccctcaattttcaga

SEQ ID NO: 411911 - DNA, 20 bp, Artificial Sequence
  Description of Artificial Sequence: Synthetic oligonucleotide
  Target: LAMA2; (+) strand; PAM type: YTN; PAM sequence: CTT
aatccctcaattttcagagc

SEQ ID NO: 411912 - DNA, 20 bp, Artificial Sequence
  Description of Artificial Sequence: Synthetic oligonucleotide
  Target: LAMA2; (+) strand; PAM type: YTN; PAM sequence: TTA
atccctcaattttcagagct

SEQ ID NO: 411913 - DNA, 20 bp, Artificial Sequence
  Description of Artificial Sequence: Synthetic oligonucleotide
  Target: LAMA2; (+) strand; PAM type: YTN; PAM sequence: CTC
aattttcagagctgagggtg

SEQ ID NO: 411914 - DNA, 20 bp, Artificial Sequence
  Description of Artificial Sequence: Synthetic oligonucleotide
  Target: LAMA2; (+) strand; PAM type: YTN; PAM sequence: TTT
tcagagctgagggtgtaaag

SEQ ID NO: 411915 - DNA, 20 bp, Artificial Sequence
  Description of Artificial Sequence: Synthetic oligonucleotide
  Target: LAMA2; (+) strand; PAM type: YTN; PAM sequence: TTT
cagagctgagggtgtaaaga

SEQ ID NO: 411916 - DNA, 20 bp, Artificial Sequence
  Description of Artificial Sequence: Synthetic oligonucleotide
  Target: LAMA2; (+) strand; PAM type: YTN; PAM sequence: TTC
agagctgagggtgtaaagat

SEQ ID NO: 411917 - DNA, 20 bp, Artificial Sequence
  Description of Artificial Sequence: Synthetic oligonucleotide
  Target: LAMA2; (+) strand; PAM type: YTN; PAM sequence: CTG
agggtgtaaagatgtttcag

SEQ ID NO: 411918 - DNA, 20 bp, Artificial Sequence
  Description of Artificial Sequence: Synthetic oligonucleotide
  Target: LAMA2; (+) strand; PAM type: YTN; PAM sequence: TTT
cagtgaaattctgcccccag

SEQ ID NO: 411919 - DNA, 20 bp, Artificial Sequence
  Description of Artificial Sequence: Synthetic oligonucleotide
  Target: LAMA2; (+) strand; PAM type: YTN; PAM sequence: TTC
agtgaaattctgcccccagt

SEQ ID NO: 411920 - DNA, 20 bp, Artificial Sequence
  Description of Artificial Sequence: Synthetic oligonucleotide
  Target: LAMA2; (+) strand; PAM type: YTN; PAM sequence: TTC
tgcccccagtggactcacag

SEQ ID NO: 411921 - DNA, 20 bp, Artificial Sequence
  Description of Artificial Sequence: Synthetic oligonucleotide
  Target: LAMA2; (+) strand; PAM type: YTN; PAM sequence: CTG
cccccagtggactcacagca

SEQ ID NO: 411922 - DNA, 20 bp, Artificial Sequence
  Description of Artificial Sequence: Synthetic oligonucleotide
  Target: LAMA2; (+) strand; PAM type: YTN; PAM sequence: CTC
acagcagataggattatctt

SEQ ID NO: 411923 - DNA, 20 bp, Artificial Sequence
  Description of Artificial Sequence: Synthetic oligonucleotide
  Target: LAMA2; (+) strand; PAM type: YTN; PAM sequence: TTA
tcttagtgatttctgaggaa

SEQ ID NO: 411924 - DNA, 20 bp, Artificial Sequence
  Description of Artificial Sequence: Synthetic oligonucleotide
  Target: LAMA2; (+) strand; PAM type: YTN; PAM sequence: CTT
agtgatttctgaggaagact

SEQ ID NO: 411925 - DNA, 20 bp, Artificial Sequence
  Description of Artificial Sequence: Synthetic oligonucleotide
  Target: LAMA2; (+) strand; PAM type: YTN; PAM sequence: TTA
gtgatttctgaggaagactg

SEQ ID NO: 411926 - DNA, 20 bp, Artificial Sequence
  Description of Artificial Sequence: Synthetic oligonucleotide
  Target: LAMA2; (+) strand; PAM type: YTN; PAM sequence: TTT
ctgaggaagactgcaagctg

SEQ ID NO: 411927 - DNA, 20 bp, Artificial Sequence
  Description of Artificial Sequence: Synthetic oligonucleotide
  Target: LAMA2; (+) strand; PAM type: YTN; PAM sequence: TTC
tgaggaagactgcaagctgc

SEQ ID NO: 411928 - DNA, 20 bp, Artificial Sequence
  Description of Artificial Sequence: Synthetic oligonucleotide
  Target: LAMA2; (+) strand; PAM type: YTN; PAM sequence: CTG
aggaagactgcaagctgcgt

SEQ ID NO: 411929 - DNA, 20 bp, Artificial Sequence
  Description of Artificial Sequence: Synthetic oligonucleotide
  Target: LAMA2; (+) strand; PAM type: YTN; PAM sequence: CTG
caagctgcgtgtgtttatcg

SEQ ID NO: 411930 - DNA, 20 bp, Artificial Sequence
  Description of Artificial Sequence: Synthetic oligonucleotide
  Target: LAMA2; (+) strand; PAM type: YTN; PAM sequence: CTG
cgtgtgtttatcgagacggt

SEQ ID NO: 411931 - DNA, 20 bp, Artificial Sequence
  Description of Artificial Sequence: Synthetic oligonucleotide
  Target: LAMA2; (+) strand; PAM type: YTN; PAM sequence: TTT
atcgagacggtcctctgtcc

SEQ ID NO: 411932 - DNA, 20 bp, Artificial Sequence
  Description of Artificial Sequence: Synthetic oligonucleotide
  Target: LAMA2; (+) strand; PAM type: YTN; PAM sequence: TTA
tcgagacggtcctctgtccg

SEQ ID NO: 411933 - DNA, 20 bp, Artificial Sequence
  Description of Artificial Sequence: Synthetic oligonucleotide
  Target: LAMA2; (+) strand; PAM type: YTN; PAM sequence: CTC
tgtccgggaaatatcgtgag

SEQ ID NO: 411934 - DNA, 20 bp, Artificial Sequence
  Description of Artificial Sequence: Synthetic oligonucleotide
  Target: LAMA2; (+) strand; PAM type: YTN; PAM sequence: CTG
tccgggaaatatcgtgagag

SEQ ID NO: 411935 - DNA, 20 bp, Artificial Sequence
  Description of Artificial Sequence: Synthetic oligonucleotide
  Target: LAMA2; (+) strand; PAM type: YTN; PAM sequence: CTG
ataaaagatcccaattctat

SEQ ID NO: 411936 - DNA, 20 bp, Artificial Sequence
  Description of Artificial Sequence: Synthetic oligonucleotide
  Target: LAMA2; (+) strand; PAM type: YTN; PAM sequence: TTC
tattaatagaagtattcatg

SEQ ID NO: 411937 - DNA, 20 bp, Artificial Sequence
  Description of Artificial Sequence: Synthetic oligonucleotide
  Target: LAMA2; (+) strand; PAM type: YTN; PAM sequence: CTA
ttaatagaagtattcatgac

SEQ ID NO: 411938 - DNA, 20 bp, Artificial Sequence
  Description of Artificial Sequence: Synthetic oligonucleotide
  Target: LAMA2; (+) strand; PAM type: YTN; PAM sequence: TTA
atagaagtattcatgactga

SEQ ID NO: 411939 - DNA, 20 bp, Artificial Sequence
  Description of Artificial Sequence: Synthetic oligonucleotide
  Target: LAMA2; (+) strand; PAM type: YTN; PAM sequence: TTC
atgactgagatcttaagcta

SEQ ID NO: 411940 - DNA, 20 bp, Artificial Sequence
  Description of Artificial Sequence: Synthetic oligonucleotide
  Target: LAMA2; (+) strand; PAM type: YTN; PAM sequence: CTG
agatcttaagctacagaggc

SEQ ID NO: 411941 - DNA, 20 bp, Artificial Sequence
  Description of Artificial Sequence: Synthetic oligonucleotide
  Target: LAMA2; (+) strand; PAM type: YTN; PAM sequence: CTT
aagctacagaggcctttcca

SEQ ID NO: 411942 - DNA, 20 bp, Artificial Sequence
  Description of Artificial Sequence: Synthetic oligonucleotide
  Target: LAMA2; (+) strand; PAM type: YTN; PAM sequence: TTA
agctacagaggcctttccat

SEQ ID NO: 411943 - DNA, 20 bp, Artificial Sequence
  Description of Artificial Sequence: Synthetic oligonucleotide
  Target: LAMA2; (+) strand; PAM type: YTN; PAM sequence: CTA
cagaggcctttccattcggg

SEQ ID NO: 411944 - DNA, 20 bp, Artificial Sequence
  Description of Artificial Sequence: Synthetic oligonucleotide
  Target: LAMA2; (+) strand; PAM type: YTN; PAM sequence: CTT
tccattcgggctctttttgc

SEQ ID NO: 411945 - DNA, 20 bp, Artificial Sequence
  Description of Artificial Sequence: Synthetic oligonucleotide
  Target: LAMA2; (+) strand; PAM type: YTN; PAM sequence: TTT
ccattcgggctctttttgca

SEQ ID NO: 411946 - DNA, 20 bp, Artificial Sequence
  Description of Artificial Sequence: Synthetic oligonucleotide
  Target: LAMA2; (+) strand; PAM type: YTN; PAM sequence: TTC
cattcgggctctttttgcag

SEQ ID NO: 411947 - DNA, 20 bp, Artificial Sequence
  Description of Artificial Sequence: Synthetic oligonucleotide
  Target: LAMA2; (+) strand; PAM type: YTN; PAM sequence: TTC
gggctctttttgcaggcagc

SEQ ID NO: 411948 - DNA, 20 bp, Artificial Sequence
  Description of Artificial Sequence: Synthetic oligonucleotide
  Target: LAMA2; (+) strand; PAM type: YTN; PAM sequence: CTC
tttttgcaggcagcgtaata

SEQ ID NO: 411949 - DNA, 20 bp, Artificial Sequence
  Description of Artificial Sequence: Synthetic oligonucleotide
  Target: LAMA2; (+) strand; PAM type: YTN; PAM sequence: CTT
tttgcaggcagcgtaataag

SEQ ID NO: 411950 - DNA, 20 bp, Artificial Sequence
  Description of Artificial Sequence: Synthetic oligonucleotide
  Target: LAMA2; (+) strand; PAM type: YTN; PAM sequence: TTT
ttgcaggcagcgtaataaga

SEQ ID NO: 411951 - DNA, 20 bp, Artificial Sequence
  Description of Artificial Sequence: Synthetic oligonucleotide
  Target: LAMA2; (+) strand; PAM type: YTN; PAM sequence: TTT
tgcaggcagcgtaataagaa

SEQ ID NO: 411952 - DNA, 20 bp, Artificial Sequence
  Description of Artificial Sequence: Synthetic oligonucleotide
  Target: LAMA2; (+) strand; PAM type: YTN; PAM sequence: TTT
gcaggcagcgtaataagaaa

SEQ ID NO: 411953 - DNA, 20 bp, Artificial Sequence
  Description of Artificial Sequence: Synthetic oligonucleotide
  Target: LAMA2; (+) strand; PAM type: YTN; PAM sequence: TTG
caggcagcgtaataagaaag

SEQ ID NO: 411954 - DNA, 20 bp, Artificial Sequence
  Description of Artificial Sequence: Synthetic oligonucleotide
  Target: LAMA2; (+) strand; PAM type: YTN; PAM sequence: CTG
cctctaaaagaggccattca

SEQ ID NO: 411955 - DNA, 20 bp, Artificial Sequence
  Description of Artificial Sequence: Synthetic oligonucleotide
  Target: LAMA2; (+) strand; PAM type: YTN; PAM sequence: CTC
taaaagaggccattcagctg

SEQ ID NO: 411956 - DNA, 20 bp, Artificial Sequence
  Description of Artificial Sequence: Synthetic oligonucleotide
  Target: LAMA2; (+) strand; PAM type: YTN; PAM sequence: CTA
aaagaggccattcagctgtg

SEQ ID NO: 411957 - DNA, 20 bp, Artificial Sequence
  Description of Artificial Sequence: Synthetic oligonucleotide
  Target: LAMA2; (+) strand; PAM type: YTN; PAM sequence: TTC
agctgtgcgaatgaatagca

SEQ ID NO: 411958 - DNA, 20 bp, Artificial Sequence
  Description of Artificial Sequence: Synthetic oligonucleotide
  Target: LAMA2; (+) strand; PAM type: YTN; PAM sequence: CTG
tgcgaatgaatagcattttc

SEQ ID NO: 411959 - DNA, 20 bp, Artificial Sequence
  Description of Artificial Sequence: Synthetic oligonucleotide
  Target: LAMA2; (+) strand; PAM type: YTN; PAM sequence: TTT
tcctgtcctacccacggggt

SEQ ID NO: 411960 - DNA, 20 bp, Artificial Sequence
  Description of Artificial Sequence: Synthetic oligonucleotide
  Target: LAMA2; (+) strand; PAM type: YTN; PAM sequence: TTT
cctgtcctacccacggggtt

SEQ ID NO: 411961 - DNA, 20 bp, Artificial Sequence
  Description of Artificial Sequence: Synthetic oligonucleotide
  Target: LAMA2; (+) strand; PAM type: YTN; PAM sequence: TTC
ctgtcctacccacggggttt

SEQ ID NO: 411962 - DNA, 20 bp, Artificial Sequence
  Description of Artificial Sequence: Synthetic oligonucleotide
  Target: LAMA2; (+) strand; PAM type: YTN; PAM sequence: CTG
tcctacccacggggttttgc

SEQ ID NO: 411963 - DNA, 20 bp, Artificial Sequence
  Description of Artificial Sequence: Synthetic oligonucleotide
  Target: LAMA2; (+) strand; PAM type: YTN; PAM sequence: CTA
cccacggggttttgcatagc

SEQ ID NO: 411964 - DNA, 20 bp, Artificial Sequence
  Description of Artificial Sequence: Synthetic oligonucleotide
  Target: LAMA2; (+) strand; PAM type: YTN; PAM sequence: TTT
tgcatagctgtgtgaatttc

SEQ ID NO: 411965 - DNA, 20 bp, Artificial Sequence
  Description of Artificial Sequence: Synthetic oligonucleotide
  Target: LAMA2; (+) strand; PAM type: YTN; PAM sequence: TTT
gcatagctgtgtgaatttcg

SEQ ID NO: 411966 - DNA, 20 bp, Artificial Sequence
  Description of Artificial Sequence: Synthetic oligonucleotide
  Target: LAMA2; (+) strand; PAM type: YTN; PAM sequence: TTG
catagctgtgtgaatttcgg

SEQ ID NO: 411967 - DNA, 20 bp, Artificial Sequence
  Description of Artificial Sequence: Synthetic oligonucleotide
  Target: LAMA2; (+) strand; PAM type: YTN; PAM sequence: CTG
tgtgaatttcggccacagtc

SEQ ID NO: 411968 - DNA, 20 bp, Artificial Sequence
  Description of Artificial Sequence: Synthetic oligonucleotide
  Target: LAMA2; (+) strand; PAM type: YTN; PAM sequence: TTT
cggccacagtctgctcttta

SEQ ID NO: 411969 - DNA, 20 bp, Artificial Sequence
  Description of Artificial Sequence: Synthetic oligonucleotide
  Target: LAMA2; (+) strand; PAM type: YTN; PAM sequence: TTC
ggccacagtctgctctttat

SEQ ID NO: 411970 - DNA, 20 bp, Artificial Sequence
  Description of Artificial Sequence: Synthetic oligonucleotide
  Target: LAMA2; (+) strand; PAM type: YTN; PAM sequence: CTG
ctctttataactgaccatct

SEQ ID NO: 411971 - DNA, 20 bp, Artificial Sequence
  Description of Artificial Sequence: Synthetic oligonucleotide
  Target: LAMA2; (+) strand; PAM type: YTN; PAM sequence: CTC
tttataactgaccatctcct

SEQ ID NO: 411972 - DNA, 20 bp, Artificial Sequence
  Description of Artificial Sequence: Synthetic oligonucleotide
  Target: LAMA2; (+) strand; PAM type: YTN; PAM sequence: CTT
tataactgaccatctcctgg

SEQ ID NO: 411973 - DNA, 20 bp, Artificial Sequence
  Description of Artificial Sequence: Synthetic oligonucleotide
  Target: LAMA2; (+) strand; PAM type: YTN; PAM sequence: TTT
ataactgaccatctcctggg

SEQ ID NO: 411974 - DNA, 20 bp, Artificial Sequence
  Description of Artificial Sequence: Synthetic oligonucleotide
  Target: LAMA2; (+) strand; PAM type: YTN; PAM sequence: TTA
taactgaccatctcctggga

SEQ ID NO: 411975 - DNA, 20 bp, Artificial Sequence
  Description of Artificial Sequence: Synthetic oligonucleotide
  Target: LAMA2; (+) strand; PAM type: YTN; PAM sequence: CTG
accatctcctgggaagcaag

SEQ ID NO: 411976 - DNA, 20 bp, Artificial Sequence
  Description of Artificial Sequence: Synthetic oligonucleotide
  Target: LAMA2; (+) strand; PAM type: YTN; PAM sequence: CTC
ctgggaagcaagaagggaaa

SEQ ID NO: 411977 - DNA, 20 bp, Artificial Sequence
  Description of Artificial Sequence: Synthetic oligonucleotide
  Target: LAMA2; (+) strand; PAM type: YTN; PAM sequence: CTG
ggaagcaagaagggaaatac

SEQ ID NO: 411978 - DNA, 20 bp, Artificial Sequence
  Description of Artificial Sequence: Synthetic oligonucleotide
  Target: LAMA2; (+) strand; PAM type: YTN; PAM sequence: CTT
ccatgaagaccaattttacg

SEQ ID NO: 411979 - DNA, 20 bp, Artificial Sequence
  Description of Artificial Sequence: Synthetic oligonucleotide
  Target: LAMA2; (+) strand; PAM type: YTN; PAM sequence: TTC
catgaagaccaattttacgg

SEQ ID NO: 411980 - DNA, 20 bp, Artificial Sequence
  Description of Artificial Sequence: Synthetic oligonucleotide
  Target: LAMA2; (+) strand; PAM type: YTN; PAM sequence: TTT
tacggcatttcaaaacactt

SEQ ID NO: 411981 - DNA, 20 bp, Artificial Sequence
  Description of Artificial Sequence: Synthetic oligonucleotide
  Target: LAMA2; (+) strand; PAM type: YTN; PAM sequence: TTT
acggcatttcaaaacacttt

SEQ ID NO: 411982 - DNA, 20 bp, Artificial Sequence
  Description of Artificial Sequence: Synthetic oligonucleotide
  Target: LAMA2; (+) strand; PAM type: YTN; PAM sequence: TTA
cggcatttcaaaacacttta

SEQ ID NO: 411983 - DNA, 20 bp, Artificial Sequence
  Description of Artificial Sequence: Synthetic oligonucleotide
  Target: LAMA2; (+) strand; PAM type: YTN; PAM sequence: TTT
caaaacactttaagcctttt

SEQ ID NO: 411984 - DNA, 20 bp, Artificial Sequence
  Description of Artificial Sequence: Synthetic oligonucleotide
  Target: LAMA2; (+) strand; PAM type: YTN; PAM sequence: TTC
aaaacactttaagcctttta

SEQ ID NO: 411985 - DNA, 20 bp, Artificial Sequence
  Description of Artificial Sequence: Synthetic oligonucleotide
  Target: LAMA2; (+) strand; PAM type: YTN; PAM sequence: CTT
taagccttttacctgctgtg

SEQ ID NO: 411986 - DNA, 20 bp, Artificial Sequence
  Description of Artificial Sequence: Synthetic oligonucleotide
  Target: LAMA2; (+) strand; PAM type: YTN; PAM sequence: TTT
aagccttttacctgctgtgg

SEQ ID NO: 411987 - DNA, 20 bp, Artificial Sequence
  Description of Artificial Sequence: Synthetic oligonucleotide
  Target: LAMA2; (+) strand; PAM type: YTN; PAM sequence: TTA
agccttttacctgctgtggc

SEQ ID NO: 411988 - DNA, 20 bp, Artificial Sequence
  Description of Artificial Sequence: Synthetic oligonucleotide
  Target: LAMA2; (+) strand; PAM type: YTN; PAM sequence: CTT
ttacctgctgtggcagagtg

SEQ ID NO: 411989 - DNA, 20 bp, Artificial Sequence
  Description of Artificial Sequence: Synthetic oligonucleotide
  Target: LAMA2; (+) strand; PAM type: YTN; PAM sequence: TTT
tacctgctgtggcagagtgc

SEQ ID NO: 411990 - DNA, 20 bp, Artificial Sequence
  Description of Artificial Sequence: Synthetic oligonucleotide
  Target: LAMA2; (+) strand; PAM type: YTN; PAM sequence: TTT
acctgctgtggcagagtgct

SEQ ID NO: 411991 - DNA, 20 bp, Artificial Sequence
  Description of Artificial Sequence: Synthetic oligonucleotide
  Target: LAMA2; (+) strand; PAM type: YTN; PAM sequence: TTA
cctgctgtggcagagtgctt

SEQ ID NO: 411992 - DNA, 20 bp, Artificial Sequence
  Description of Artificial Sequence: Synthetic oligonucleotide
  Target: LAMA2; (+) strand; PAM type: YTN; PAM sequence: CTG
ctgtggcagagtgcttcgtt

SEQ ID NO: 411993 - DNA, 20 bp, Artificial Sequence
  Description of Artificial Sequence: Synthetic oligonucleotide
  Target: LAMA2; (+) strand; PAM type: YTN; PAM sequence: CTG
tggcagagtgcttcgtttga

SEQ ID NO: 411994 - DNA, 20 bp, Artificial Sequence
  Description of Artificial Sequence: Synthetic oligonucleotide
  Target: LAMA2; (+) strand; PAM type: YTN; PAM sequence: CTT
cgtttgactaagatcaagag

SEQ ID NO: 411995 - DNA, 20 bp, Artificial Sequence
  Description of Artificial Sequence: Synthetic oligonucleotide
  Target: LAMA2; (+) strand; PAM type: YTN; PAM sequence: TTC
gtttgactaagatcaagaga

SEQ ID NO: 411996 - DNA, 20 bp, Artificial Sequence
  Description of Artificial Sequence: Synthetic oligonucleotide
  Target: LAMA2; (+) strand; PAM type: YTN; PAM sequence: TTT
gactaagatcaagagaaaag

SEQ ID NO: 411997 - DNA, 20 bp, Artificial Sequence
  Description of Artificial Sequence: Synthetic oligonucleotide
  Target: LAMA2; (+) strand; PAM type: YTN; PAM sequence: TTG
actaagatcaagagaaaaga

SEQ ID NO: 411998 - DNA, 20 bp, Artificial Sequence
  Description of Artificial Sequence: Synthetic oligonucleotide
  Target: LAMA2; (+) strand; PAM type: YTN; PAM sequence: CTA
agatcaagagaaaagagaac

SEQ ID NO: 411999 - DNA, 20 bp, Artificial Sequence
  Description of Artificial Sequence: Synthetic oligonucleotide
  Target: LAMA2; (+) strand; PAM type: YTN; PAM sequence: CTT
ttcctcatcaagtaaaaatt

SEQ ID NO: 412000 - DNA, 20 bp, Artificial Sequence
  Description of Artificial Sequence: Synthetic oligonucleotide
  Target: LAMA2; (+) strand; PAM type: YTN; PAM sequence: TTT
tcctcatcaagtaaaaattt

SEQ ID NO: 412001 - DNA, 20 bp, Artificial Sequence
  Description of Artificial Sequence: Synthetic oligonucleotide
  Target: LAMA2; (+) strand; PAM type: YTN; PAM sequence: TTT
cctcatcaagtaaaaatttc

SEQ ID NO: 412002 - DNA, 20 bp, Artificial Sequence
  Description of Artificial Sequence: Synthetic oligonucleotide
  Target: LAMA2; (+) strand; PAM type: YTN; PAM sequence: TTC
ctcatcaagtaaaaatttcc

SEQ ID NO: 412003 - DNA, 20 bp, Artificial Sequence
  Description of Artificial Sequence: Synthetic oligonucleotide
  Target: LAMA2; (+) strand; PAM type: YTN; PAM sequence: CTC
atcaagtaaaaatttcctgt

SEQ ID NO: 412004 - DNA, 20 bp, Artificial Sequence
  Description of Artificial Sequence: Synthetic oligonucleotide
  Target: LAMA2; (+) strand; PAM type: YTN; PAM sequence: TTT
cctgtgtgctgatgagtcat

SEQ ID NO: 412005 - DNA, 20 bp, Artificial Sequence
  Description of Artificial Sequence: Synthetic oligonucleotide
  Target: LAMA2; (+) strand; PAM type: YTN; PAM sequence: TTC
ctgtgtgctgatgagtcatc

SEQ ID NO: 412006 - DNA, 20 bp, Artificial Sequence
  Description of Artificial Sequence: Synthetic oligonucleotide
  Target: LAMA2; (+) strand; PAM type: YTN; PAM sequence: CTG
tgtgctgatgagtcatctct

SEQ ID NO: 412007 - DNA, 20 bp, Artificial Sequence
  Description of Artificial Sequence: Synthetic oligonucleotide
  Target: LAMA2; (+) strand; PAM type: YTN; PAM sequence: CTG
atgagtcatctctgaggtac

SEQ ID NO: 412008 - DNA, 20 bp, Artificial Sequence
  Description of Artificial Sequence: Synthetic oligonucleotide
  Target: LAMA2; (+) strand; PAM type: YTN; PAM sequence: CTC
tgaggtacactctttgggaa

SEQ ID NO: 412009 - DNA, 20 bp, Artificial Sequence
  Description of Artificial Sequence: Synthetic oligonucleotide
  Target: LAMA2; (+) strand; PAM type: YTN; PAM sequence: CTG
aggtacactctttgggaaga

SEQ ID NO: 412010 - DNA, 20 bp, Artificial Sequence
  Description of Artificial Sequence: Synthetic oligonucleotide
  Target: LAMA2; (+) strand; PAM type: YTN; PAM sequence: CTC
tttgggaagaacactgtgca

SEQ ID NO: 412011 - DNA, 20 bp, Artificial Sequence
  Description of Artificial Sequence: Synthetic oligonucleotide
  Target: LAMA2; (+) strand; PAM type: YTN; PAM sequence: CTT
tgggaagaacactgtgcatc

SEQ ID NO: 412012 - DNA, 20 bp, Artificial Sequence
  Description of Artificial Sequence: Synthetic oligonucleotide
  Target: LAMA2; (+) strand; PAM type: YTN; PAM sequence: TTT
gggaagaacactgtgcatca

SEQ ID NO: 412013 - DNA, 20 bp, Artificial Sequence
  Description of Artificial Sequence: Synthetic oligonucleotide
  Target: LAMA2; (+) strand; PAM type: YTN; PAM sequence: TTG
ggaagaacactgtgcatcaa

SEQ ID NO: 412014 - DNA, 20 bp, Artificial Sequence
  Description of Artificial Sequence: Synthetic oligonucleotide
  Target: LAMA2; (+) strand; PAM type: YTN; PAM sequence: CTG
tgcatcaaaagcctgccttg

SEQ ID NO: 412015 - DNA, 20 bp, Artificial Sequence
  Description of Artificial Sequence: Synthetic oligonucleotide
  Target: LAMA2; (+) strand; PAM type: YTN; PAM sequence: CTG
ccttgggctgcttgagaacc

SEQ ID NO: 412016 - DNA, 20 bp, Artificial Sequence
  Description of Artificial Sequence: Synthetic oligonucleotide
  Target: LAMA2; (+) strand; PAM type: YTN; PAM sequence: CTT
gggctgcttgagaacctctg

SEQ ID NO: 412017 - DNA, 20 bp, Artificial Sequence
  Description of Artificial Sequence: Synthetic oligonucleotide
  Target: LAMA2; (+) strand; PAM type: YTN; PAM sequence: TTG
ggctgcttgagaacctctgc

SEQ ID NO: 412018 - DNA, 20 bp, Artificial Sequence
  Description of Artificial Sequence: Synthetic oligonucleotide
  Target: LAMA2; (+) strand; PAM type: YTN; PAM sequence: CTG
cttgagaacctctgctgagt

SEQ ID NO: 412019 - DNA, 20 bp, Artificial Sequence
  Description of Artificial Sequence: Synthetic oligonucleotide
  Target: LAMA2; (+) strand; PAM type: YTN; PAM sequence: CTT
gagaacctctgctgagtcag

SEQ ID NO: 412020 - DNA, 20 bp, Artificial Sequence
  Description of Artificial Sequence: Synthetic oligonucleotide
  Target: LAMA2; (+) strand; PAM type: YTN; PAM sequence: TTG
agaacctctgctgagtcagc

SEQ ID NO: 412021 - DNA, 20 bp, Artificial Sequence
  Description of Artificial Sequence: Synthetic oligonucleotide
  Target: LAMA2; (+) strand; PAM type: YTN; PAM sequence: CTC
tgctgagtcagcactcactg

SEQ ID NO: 412022 - DNA, 20 bp, Artificial Sequence
  Description of Artificial Sequence: Synthetic oligonucleotide
  Target: LAMA2; (+) strand; PAM type: YTN; PAM sequence: CTG
ctgagtcagcactcactggg

SEQ ID NO: 412023 - DNA, 20 bp, Artificial Sequence
  Description of Artificial Sequence: Synthetic oligonucleotide
  Target: LAMA2; (+) strand; PAM type: YTN; PAM sequence: CTG
agtcagcactcactggggca

SEQ ID NO: 412024 - DNA, 20 bp, Artificial Sequence
  Description of Artificial Sequence: Synthetic oligonucleotide
  Target: LAMA2; (+) strand; PAM type: YTN; PAM sequence: CTC
actggggcagcggcccagcc

SEQ ID NO: 412025 - DNA, 20 bp, Artificial Sequence
  Description of Artificial Sequence: Synthetic oligonucleotide
  Target: LAMA2; (+) strand; PAM type: YTN; PAM sequence: CTG
gggcagcggcccagccagag

SEQ ID NO: 412026 - DNA, 20 bp, Artificial Sequence
  Description of Artificial Sequence: Synthetic oligonucleotide
  Target: LAMA2; (+) strand; PAM type: YTN; PAM sequence: CTA
ttaagtgcagatcttaaaaa

SEQ ID NO: 412027 - DNA, 20 bp, Artificial Sequence
  Description of Artificial Sequence: Synthetic oligonucleotide
  Target: LAMA2; (+) strand; PAM type: YTN; PAM sequence: TTA
agtgcagatcttaaaaacag

SEQ ID NO: 412028 - DNA, 20 bp, Artificial Sequence
  Description of Artificial Sequence: Synthetic oligonucleotide
  Target: LAMA2; (+) strand; PAM type: YTN; PAM sequence: CTT
aaaaacagatgtgttggtga

SEQ ID NO: 412029 - DNA, 20 bp, Artificial Sequence
  Description of Artificial Sequence: Synthetic oligonucleotide
  Target: LAMA2; (+) strand; PAM type: YTN; PAM sequence: TTA
aaaacagatgtgttggtgag

SEQ ID NO: 412030 - DNA, 20 bp, Artificial Sequence
  Description of Artificial Sequence: Synthetic oligonucleotide
  Target: LAMA2; (+) strand; PAM type: YTN; PAM sequence: TTG
gtgagagtgtgcaggttatt

SEQ ID NO: 412031 - DNA, 20 bp, Artificial Sequence
  Description of Artificial Sequence: Synthetic oligonucleotide
  Target: LAMA2; (+) strand; PAM type: YTN; PAM sequence: TTA
ttttctcatgtactgcatgt

SEQ ID NO: 412032 - DNA, 20 bp, Artificial Sequence
  Description of Artificial Sequence: Synthetic oligonucleotide
  Target: LAMA2; (+) strand; PAM type: YTN; PAM sequence: TTT
tctcatgtactgcatgttct

SEQ ID NO: 412033 - DNA, 20 bp, Artificial Sequence
  Description of Artificial Sequence: Synthetic oligonucleotide
  Target: LAMA2; (+) strand; PAM type: YTN; PAM sequence: TTT
ctcatgtactgcatgttcta

SEQ ID NO: 412034 - DNA, 20 bp, Artificial Sequence
  Description of Artificial Sequence: Synthetic oligonucleotide
  Target: LAMA2; (+) strand; PAM type: YTN; PAM sequence: TTC
tcatgtactgcatgttctaa

SEQ ID NO: 412035 - DNA, 20 bp, Artificial Sequence
  Description of Artificial Sequence: Synthetic oligonucleotide
  Target: LAMA2; (+) strand; PAM type: YTN; PAM sequence: CTC
atgtactgcatgttctaaga

SEQ ID NO: 412036 - DNA, 20 bp, Artificial Sequence
  Description of Artificial Sequence: Synthetic oligonucleotide
  Target: LAMA2; (+) strand; PAM type: YTN; PAM sequence: CTG
catgttctaagagatgtcat

SEQ ID NO: 412037 - DNA, 20 bp, Artificial Sequence
  Description of Artificial Sequence: Synthetic oligonucleotide
  Target: LAMA2; (+) strand; PAM type: YTN; PAM sequence: TTC
taagagatgtcataagcagc

SEQ ID NO: 412038 - DNA, 20 bp, Artificial Sequence
  Description of Artificial Sequence: Synthetic oligonucleotide
  Target: LAMA2; (+) strand; PAM type: YTN; PAM sequence: CTA
agagatgtcataagcagcct

SEQ ID NO: 412039 - DNA, 20 bp, Artificial Sequence
  Description of Artificial Sequence: Synthetic oligonucleotide
  Target: LAMA2; (+) strand; PAM type: YTN; PAM sequence: CTG
tatatcgacctatcttgtga

SEQ ID NO: 412040 - DNA, 20 bp, Artificial Sequence
  Description of Artificial Sequence: Synthetic oligonucleotide
  Target: LAMA2; (+) strand; PAM type: YTN; PAM sequence: CTA
tcttgtgaaaatagagaaca

SEQ ID NO: 412041 - DNA, 20 bp, Artificial Sequence
  Description of Artificial Sequence: Synthetic oligonucleotide
  Target: LAMA2; (+) strand; PAM type: YTN; PAM sequence: CTT
gtgaaaatagagaacaggga

SEQ ID NO: 412042 - DNA, 20 bp, Artificial Sequence
  Description of Artificial Sequence: Synthetic oligonucleotide
  Target: LAMA2; (+) strand; PAM type: YTN; PAM sequence: TTG
tgaaaatagagaacagggaa

SEQ ID NO: 412043 - DNA, 20 bp, Artificial Sequence
  Description of Artificial Sequence: Synthetic oligonucleotide
  Target: LAMA2; (+) strand; PAM type: YTN; PAM sequence: TTG
tggctttggtaatttaagga

SEQ ID NO: 412044 - DNA, 20 bp, Artificial Sequence
  Description of Artificial Sequence: Synthetic oligonucleotide
  Target: LAMA2; (+) strand; PAM type: YTN; PAM sequence: CTT
tggtaatttaaggagccttg

SEQ ID NO: 412045 - DNA, 20 bp, Artificial Sequence
  Description of Artificial Sequence: Synthetic oligonucleotide
  Target: LAMA2; (+) strand; PAM type: YTN; PAM sequence: TTT
ggtaatttaaggagccttga

SEQ ID NO: 412046 - DNA, 20 bp, Artificial Sequence
  Description of Artificial Sequence: Synthetic oligonucleotide
  Target: LAMA2; (+) strand; PAM type: YTN; PAM sequence: TTG
gtaatttaaggagccttgat

SEQ ID NO: 412047 - DNA, 20 bp, Artificial Sequence
  Description of Artificial Sequence: Synthetic oligonucleotide
  Target: LAMA2; (+) strand; PAM type: YTN; PAM sequence: TTT
aaggagccttgattatttat

SEQ ID NO: 412048 - DNA, 20 bp, Artificial Sequence
  Description of Artificial Sequence: Synthetic oligonucleotide
  Target: LAMA2; (+) strand; PAM type: YTN; PAM sequence: TTA
aggagccttgattatttatg

SEQ ID NO: 412049 - DNA, 20 bp, Artificial Sequence
  Description of Artificial Sequence: Synthetic oligonucleotide
  Target: LAMA2; (+) strand; PAM type: YTN; PAM sequence: CTT
gattatttatggagctgtgt

SEQ ID NO: 412050 - DNA, 20 bp, Artificial Sequence
  Description of Artificial Sequence: Synthetic oligonucleotide
  Target: LAMA2; (+) strand; PAM type: YTN; PAM sequence: TTG
attatttatggagctgtgtg

SEQ ID NO: 412051 - DNA, 20 bp, Artificial Sequence
  Description of Artificial Sequence: Synthetic oligonucleotide
  Target: LAMA2; (+) strand; PAM type: YTN; PAM sequence: TTA
tttatggagctgtgtgttat

SEQ ID NO: 412052 - DNA, 20 bp, Artificial Sequence
  Description of Artificial Sequence: Synthetic oligonucleotide
  Target: LAMA2; (+) strand; PAM type: YTN; PAM sequence: TTT
atggagctgtgtgttatggt

SEQ ID NO: 412053 - DNA, 20 bp, Artificial Sequence
  Description of Artificial Sequence: Synthetic oligonucleotide
  Target: LAMA2; (+) strand; PAM type: YTN; PAM sequence: TTA
tggagctgtgtgttatggta

SEQ ID NO: 412054 - DNA, 20 bp, Artificial Sequence
  Description of Artificial Sequence: Synthetic oligonucleotide
  Target: LAMA2; (+) strand; PAM type: YTN; PAM sequence: CTG
tgtgttatggtagccaaatg

SEQ ID NO: 412055 - DNA, 20 bp, Artificial Sequence
  Description of Artificial Sequence: Synthetic oligonucleotide
  Target: LAMA2; (+) strand; PAM type: YTN; PAM sequence: TTA
tggtagccaaatgtgatcta

SEQ ID NO: 412056 - DNA, 20 bp, Artificial Sequence
  Description of Artificial Sequence: Synthetic oligonucleotide
  Target: LAMA2; (+) strand; PAM type: YTN; PAM sequence: CTA
ctcagccaggactgctgtat

SEQ ID NO: 412057 - DNA, 20 bp, Artificial Sequence
  Description of Artificial Sequence: Synthetic oligonucleotide
  Target: LAMA2; (+) strand; PAM type: YTN; PAM sequence: CTC
agccaggactgctgtatgct

SEQ ID NO: 412058 - DNA, 20 bp, Artificial Sequence
  Description of Artificial Sequence: Synthetic oligonucleotide
  Target: LAMA2; (+) strand; PAM type: YTN; PAM sequence: CTG
ctgtatgctttgcaaggccc

SEQ ID NO: 412059 - DNA, 20 bp, Artificial Sequence
  Description of Artificial Sequence: Synthetic oligonucleotide
  Target: LAMA2; (+) strand; PAM type: YTN; PAM sequence: CTG
tatgctttgcaaggcccagt

SEQ ID NO: 412060 - DNA, 20 bp, Artificial Sequence
  Description of Artificial Sequence: Synthetic oligonucleotide
  Target: LAMA2; (+) strand; PAM type: YTN; PAM sequence: CTT
tgcaaggcccagtgcaaaat

SEQ ID NO: 412061 - DNA, 20 bp, Artificial Sequence
  Description of Artificial Sequence: Synthetic oligonucleotide
  Target: LAMA2; (+) strand; PAM type: YTN; PAM sequence: TTT
gcaaggcccagtgcaaaatg

SEQ ID NO: 412062 - DNA, 20 bp, Artificial Sequence
  Description of Artificial Sequence: Synthetic oligonucleotide
  Target: LAMA2; (+) strand; PAM type: YTN; PAM sequence: TTG
caaggcccagtgcaaaatgg

SEQ ID NO: 412063 - DNA, 20 bp, Artificial Sequence
  Description of Artificial Sequence: Synthetic oligonucleotide
  Target: LAMA2; (+) strand; PAM type: YTN; PAM sequence: CTC
actgaaaaattattaagaat

SEQ ID NO: 412064 - DNA, 20 bp, Artificial Sequence
  Description of Artificial Sequence: Synthetic oligonucleotide
  Target: LAMA2; (+) strand; PAM type: YTN; PAM sequence: CTG
aaaaattattaagaatttca

SEQ ID NO: 412065 - DNA, 20 bp, Artificial Sequence
  Description of Artificial Sequence: Synthetic oligonucleotide
  Target: LAMA2; (+) strand; PAM type: YTN; PAM sequence: TTA
ttaagaatttcaagatggtg

SEQ ID NO: 412066 - DNA, 20 bp, Artificial Sequence
  Description of Artificial Sequence: Synthetic oligonucleotide
  Target: LAMA2; (+) strand; PAM type: YTN; PAM sequence: TTA
agaatttcaagatggtgaca

SEQ ID NO: 412067 - DNA, 20 bp, Artificial Sequence
  Description of Artificial Sequence: Synthetic oligonucleotide
  Target: LAMA2; (+) strand; PAM type: YTN; PAM sequence: TTT
caagatggtgacagcagagc

SEQ ID NO: 412068 - DNA, 20 bp, Artificial Sequence
  Description of Artificial Sequence: Synthetic oligonucleotide
  Target: LAMA2; (+) strand; PAM type: YTN; PAM sequence: TTC
aagatggtgacagcagagca

SEQ ID NO: 412069 - DNA, 20 bp, Artificial Sequence
  Description of Artificial Sequence: Synthetic oligonucleotide
  Target: LAMA2; (+) strand; PAM type: YTN; PAM sequence: TTA
aaccatgtgactgcacagcc

SEQ ID NO: 412070 - DNA, 20 bp, Artificial Sequence
  Description of Artificial Sequence: Synthetic oligonucleotide
  Target: LAMA2; (+) strand; PAM type: YTN; PAM sequence: CTG
cacagccccgcacctagctc

SEQ ID NO: 412071 - DNA, 20 bp, Artificial Sequence
  Description of Artificial Sequence: Synthetic oligonucleotide
  Target: LAMA2; (+) strand; PAM type: YTN; PAM sequence: CTA
gctctccccctcagcaccct

SEQ ID NO: 412072 - DNA, 20 bp, Artificial Sequence
  Description of Artificial Sequence: Synthetic oligonucleotide
  Target: LAMA2; (+) strand; PAM type: YTN; PAM sequence: CTC
tccccctcagcaccctagga

SEQ ID NO: 412073 - DNA, 20 bp, Artificial Sequence
  Description of Artificial Sequence: Synthetic oligonucleotide
  Target: LAMA2; (+) strand; PAM type: YTN; PAM sequence: CTC
cccctcagcaccctaggaag

SEQ ID NO: 412074 - DNA, 20 bp, Artificial Sequence
  Description of Artificial Sequence: Synthetic oligonucleotide
  Target: LAMA2; (+) strand; PAM type: YTN; PAM sequence: CTC
agcaccctaggaagctgatc

SEQ ID NO: 412075 - DNA, 20 bp, Artificial Sequence
  Description of Artificial Sequence: Synthetic oligonucleotide
  Target: LAMA2; (+) strand; PAM type: YTN; PAM sequence: CTA
ggaagctgatctttgaacag

SEQ ID NO: 412076 - DNA, 20 bp, Artificial Sequence
  Description of Artificial Sequence: Synthetic oligonucleotide
  Target: LAMA2; (+) strand; PAM type: YTN; PAM sequence: CTG
atctttgaacagtggcagtt

SEQ ID NO: 412077 - DNA, 20 bp, Artificial Sequence
  Description of Artificial Sequence: Synthetic oligonucleotide
  Target: LAMA2; (+) strand; PAM type: YTN; PAM sequence: CTT
tgaacagtggcagttgaaat

SEQ ID NO: 412078 - DNA, 20 bp, Artificial Sequence
  Description of Artificial Sequence: Synthetic oligonucleotide
  Target: LAMA2; (+) strand; PAM type: YTN; PAM sequence: TTT
gaacagtggcagttgaaatg

SEQ ID NO: 412079 - DNA, 20 bp, Artificial Sequence
  Description of Artificial Sequence: Synthetic oligonucleotide
  Target: LAMA2; (+) strand; PAM type: YTN; PAM sequence: TTG
aacagtggcagttgaaatgg

SEQ ID NO: 412080 - DNA, 20 bp, Artificial Sequence
  Description of Artificial Sequence: Synthetic oligonucleotide
  Target: LAMA2; (+) strand; PAM type: YTN; PAM sequence: TTG
aaatggtgtatggtgggtta

SEQ ID NO: 412081 - DNA, 20 bp, Artificial Sequence
  Description of Artificial Sequence: Synthetic oligonucleotide
  Target: LAMA2; (+) strand; PAM type: YTN; PAM sequence: TTA
catttttaaaatgtgctggg

SEQ ID NO: 412082 - DNA, 20 bp, Artificial Sequence
  Description of Artificial Sequence: Synthetic oligonucleotide
  Target: LAMA2; (+) strand; PAM type: YTN; PAM sequence: TTT
ttaaaatgtgctgggttgcc

SEQ ID NO: 412083 - DNA, 20 bp, Artificial Sequence
  Description of Artificial Sequence: Synthetic oligonucleotide
  Target: LAMA2; (+) strand; PAM type: YTN; PAM sequence: TTT
taaaatgtgctgggttgcct

SEQ ID NO: 412084 - DNA, 20 bp, Artificial Sequence
  Description of Artificial Sequence: Synthetic oligonucleotide
  Target: LAMA2; (+) strand; PAM type: YTN; PAM sequence: TTT
aaaatgtgctgggttgccta

SEQ ID NO: 412085 - DNA, 20 bp, Artificial Sequence
  Description of Artificial Sequence: Synthetic oligonucleotide
  Target: LAMA2; (+) strand; PAM type: YTN; PAM sequence: TTA
aaatgtgctgggttgcctag

SEQ ID NO: 412086 - DNA, 20 bp, Artificial Sequence
  Description of Artificial Sequence: Synthetic oligonucleotide
  Target: LAMA2; (+) strand; PAM type: YTN; PAM sequence: CTG
ggttgcctagcaactggcaa

SEQ ID NO: 412087 - DNA, 20 bp, Artificial Sequence
  Description of Artificial Sequence: Synthetic oligonucleotide
  Target: LAMA2; (+) strand; PAM type: YTN; PAM sequence: TTG
cctagcaactggcaagggcc

SEQ ID NO: 412088 - DNA, 20 bp, Artificial Sequence
  Description of Artificial Sequence: Synthetic oligonucleotide
  Target: LAMA2; (+) strand; PAM type: YTN; PAM sequence: CTA
gcaactggcaagggcctgaa

SEQ ID NO: 412089 - DNA, 20 bp, Artificial Sequence
  Description of Artificial Sequence: Synthetic oligonucleotide
  Target: LAMA2; (+) strand; PAM type: YTN; PAM sequence: CTG
gcaagggcctgaatgggctg

SEQ ID NO: 412090 - DNA, 20 bp, Artificial Sequence
  Description of Artificial Sequence: Synthetic oligonucleotide
  Target: LAMA2; (+) strand; PAM type: YTN; PAM sequence: CTG
aatgggctgacgtgcaggtt

SEQ ID NO: 412091 - DNA, 20 bp, Artificial Sequence
  Description of Artificial Sequence: Synthetic oligonucleotide
  Target: LAMA2; (+) strand; PAM type: YTN; PAM sequence: CTG
acgtgcaggtttagatacac

SEQ ID NO: 412092 - DNA, 20 bp, Artificial Sequence
  Description of Artificial Sequence: Synthetic oligonucleotide
  Target: LAMA2; (+) strand; PAM type: YTN; PAM sequence: TTT
agatacaccatcttgaaagt

SEQ ID NO: 412093 - DNA, 20 bp, Artificial Sequence
  Description of Artificial Sequence: Synthetic oligonucleotide
  Target: LAMA2; (+) strand; PAM type: YTN; PAM sequence: TTA
gatacaccatcttgaaagtc

SEQ ID NO: 412094 - DNA, 20 bp, Artificial Sequence
  Description of Artificial Sequence: Synthetic oligonucleotide
  Target: LAMA2; (+) strand; PAM type: YTN; PAM sequence: CTT
gaaagtctacattcatggaa

SEQ ID NO: 412095 - DNA, 20 bp, Artificial Sequence
  Description of Artificial Sequence: Synthetic oligonucleotide
  Target: LAMA2; (+) strand; PAM type: YTN; PAM sequence: TTG
aaagtctacattcatggaaa

SEQ ID NO: 412096 - DNA, 20 bp, Artificial Sequence
  Description of Artificial Sequence: Synthetic oligonucleotide
  Target: LAMA2; (+) strand; PAM type: YTN; PAM sequence: CTA
cattcatggaaaccttctag

SEQ ID NO: 412097 - DNA, 20 bp, Artificial Sequence
  Description of Artificial Sequence: Synthetic oligonucleotide
  Target: LAMA2; (+) strand; PAM type: YTN; PAM sequence: TTC
atggaaaccttctagtggac

SEQ ID NO: 412098 - DNA, 20 bp, Artificial Sequence
  Description of Artificial Sequence: Synthetic oligonucleotide
  Target: LAMA2; (+) strand; PAM type: YTN; PAM sequence: CTT
ctagtggactgataattttc

SEQ ID NO: 412099 - DNA, 20 bp, Artificial Sequence
  Description of Artificial Sequence: Synthetic oligonucleotide
  Target: LAMA2; (+) strand; PAM type: YTN; PAM sequence: TTC
tagtggactgataattttca

SEQ ID NO: 412100 - DNA, 20 bp, Artificial Sequence
  Description of Artificial Sequence: Synthetic oligonucleotide
  Target: LAMA2; (+) strand; PAM type: YTN; PAM sequence: CTA
gtggactgataattttcaag

SEQ ID NO: 412101 - DNA, 20 bp, Artificial Sequence
  Description of Artificial Sequence: Synthetic oligonucleotide
  Target: LAMA2; (+) strand; PAM type: YTN; PAM sequence: CTG
ataattttcaagaaaaagta

SEQ ID NO: 412102 - DNA, 20 bp, Artificial Sequence
  Description of Artificial Sequence: Synthetic oligonucleotide
  Target: LAMA2; (+) strand; PAM type: YTN; PAM sequence: TTT
tcaagaaaaagtaatatagt

SEQ ID NO: 412103 - DNA, 20 bp, Artificial Sequence
  Description of Artificial Sequence: Synthetic oligonucleotide
  Target: LAMA2; (+) strand; PAM type: YTN; PAM sequence: TTT
caagaaaaagtaatatagtg

SEQ ID NO: 412104 - DNA, 20 bp, Artificial Sequence
  Description of Artificial Sequence: Synthetic oligonucleotide
  Target: LAMA2; (+) strand; PAM type: YTN; PAM sequence: TTC
aagaaaaagtaatatagtgg

SEQ ID NO: 412105 - DNA, 20 bp, Artificial Sequence
  Description of Artificial Sequence: Synthetic oligonucleotide
  Target: LAMA2; (+) strand; PAM type: YTN; PAM sequence: TTT
tgctactcttataacccaag

SEQ ID NO: 412106 - DNA, 20 bp, Artificial Sequence
  Description of Artificial Sequence: Synthetic oligonucleotide
  Target: LAMA2; (+) strand; PAM type: YTN; PAM sequence: TTT
gctactcttataacccaagt

SEQ ID NO: 412107 - DNA, 20 bp, Artificial Sequence
  Description of Artificial Sequence: Synthetic oligonucleotide
  Target: LAMA2; (+) strand; PAM type: YTN; PAM sequence: TTG
ctactcttataacccaagtg

SEQ ID NO: 412108 - DNA, 20 bp, Artificial Sequence
  Description of Artificial Sequence: Synthetic oligonucleotide
  Target: LAMA2; (+) strand; PAM type: YTN; PAM sequence: CTA
ctcttataacccaagtggct

SEQ ID NO: 412109 - DNA, 20 bp, Artificial Sequence
  Description of Artificial Sequence: Synthetic oligonucleotide
  Target: LAMA2; (+) strand; PAM type: YTN; PAM sequence: CTC
ttataacccaagtggctagc

SEQ ID NO: 412110 - DNA, 20 bp, Artificial Sequence
  Description of Artificial Sequence: Synthetic oligonucleotide
  Target: LAMA2; (+) strand; PAM type: YTN; PAM sequence: CTT
ataacccaagtggctagctt

SEQ ID NO: 412111 - DNA, 20 bp, Artificial Sequence
  Description of Artificial Sequence: Synthetic oligonucleotide
  Target: LAMA2; (+) strand; PAM type: YTN; PAM sequence: TTA
taacccaagtggctagcttg

SEQ ID NO: 412112 - DNA, 20 bp, Artificial Sequence
  Description of Artificial Sequence: Synthetic oligonucleotide
  Target: LAMA2; (+) strand; PAM type: YTN; PAM sequence: CTA
gcttgtcattttccctgttc

SEQ ID NO: 412113 - DNA, 20 bp, Artificial Sequence
  Description of Artificial Sequence: Synthetic oligonucleotide
  Target: LAMA2; (+) strand; PAM type: YTN; PAM sequence: CTT
gtcattttccctgttcgatc

SEQ ID NO: 412114 - DNA, 20 bp, Artificial Sequence
  Description of Artificial Sequence: Synthetic oligonucleotide
  Target: LAMA2; (+) strand; PAM type: YTN; PAM sequence: TTG
tcattttccctgttcgatct

SEQ ID NO: 412115 - DNA, 20 bp, Artificial Sequence
  Description of Artificial Sequence: Synthetic oligonucleotide
  Target: LAMA2; (+) strand; PAM type: YTN; PAM sequence: TTT
tccctgttcgatcttctaag

SEQ ID NO: 412116 - DNA, 20 bp, Artificial Sequence
  Description of Artificial Sequence: Synthetic oligonucleotide
  Target: LAMA2; (+) strand; PAM type: YTN; PAM sequence: TTT
ccctgttcgatcttctaaga

SEQ ID NO: 412117 - DNA, 20 bp, Artificial Sequence
  Description of Artificial Sequence: Synthetic oligonucleotide
  Target: LAMA2; (+) strand; PAM type: YTN; PAM sequence: TTC
cctgttcgatcttctaagaa

SEQ ID NO: 412118 - DNA, 20 bp, Artificial Sequence
  Description of Artificial Sequence: Synthetic oligonucleotide
  Target: LAMA2; (+) strand; PAM type: YTN; PAM sequence: CTG
ttcgatcttctaagaataga

SEQ ID NO: 412119 - DNA, 20 bp, Artificial Sequence
  Description of Artificial Sequence: Synthetic oligonucleotide
  Target: LAMA2; (+) strand; PAM type: YTN; PAM sequence: TTC
gatcttctaagaatagagct

SEQ ID NO: 412120 - DNA, 20 bp, Artificial Sequence
  Description of Artificial Sequence: Synthetic oligonucleotide
  Target: LAMA2; (+) strand; PAM type: YTN; PAM sequence: CTT
ctaagaatagagctcttcat

SEQ ID NO: 412121 - DNA, 20 bp, Artificial Sequence
  Description of Artificial Sequence: Synthetic oligonucleotide
  Target: LAMA2; (+) strand; PAM type: YTN; PAM sequence: TTC
taagaatagagctcttcata

SEQ ID NO: 412122 - DNA, 20 bp, Artificial Sequence
  Description of Artificial Sequence: Synthetic oligonucleotide
  Target: LAMA2; (+) strand; PAM type: YTN; PAM sequence: CTA
agaatagagctcttcatatg

SEQ ID NO: 412123 - DNA, 20 bp, Artificial Sequence
  Description of Artificial Sequence: Synthetic oligonucleotide
  Target: LAMA2; (+) strand; PAM type: YTN; PAM sequence: CTC
ttcatatgtgaaggaaaaat

SEQ ID NO: 412124 - DNA, 20 bp, Artificial Sequence
  Description of Artificial Sequence: Synthetic oligonucleotide
  Target: LAMA2; (+) strand; PAM type: YTN; PAM sequence: CTT
catatgtgaaggaaaaatga

SEQ ID NO: 412125 - DNA, 20 bp, Artificial Sequence
  Description of Artificial Sequence: Synthetic oligonucleotide
  Target: LAMA2; (+) strand; PAM type: YTN; PAM sequence: TTC
atatgtgaaggaaaaatgaa

SEQ ID NO: 412126 - DNA, 20 bp, Artificial Sequence
  Description of Artificial Sequence: Synthetic oligonucleotide
  Target: LAMA2; (+) strand; PAM type: YTN; PAM sequence: TTC
cagttttctcagaaatatac

SEQ ID NO: 412127 - DNA, 20 bp, Artificial Sequence
  Description of Artificial Sequence: Synthetic oligonucleotide
  Target: LAMA2; (+) strand; PAM type: YTN; PAM sequence: TTT
tctcagaaatatacataaat

SEQ ID NO: 412128 - DNA, 20 bp, Artificial Sequence
  Description of Artificial Sequence: Synthetic oligonucleotide
  Target: LAMA2; (+) strand; PAM type: YTN; PAM sequence: TTT
ctcagaaatatacataaatt

SEQ ID NO: 412129 - DNA, 20 bp, Artificial Sequence
  Description of Artificial Sequence: Synthetic oligonucleotide
  Target: LAMA2; (+) strand; PAM type: YTN; PAM sequence: TTC
tcagaaatatacataaattt

SEQ ID NO: 412130 - DNA, 20 bp, Artificial Sequence
  Description of Artificial Sequence: Synthetic oligonucleotide
  Target: LAMA2; (+) strand; PAM type: YTN; PAM sequence: CTC
agaaatatacataaattttt

SEQ ID NO: 412131 - DNA, 20 bp, Artificial Sequence
  Description of Artificial Sequence: Synthetic oligonucleotide
  Target: LAMA2; (+) strand; PAM type: YTN; PAM sequence: TTT
ttagaggataatgaaactat

SEQ ID NO: 412132 - DNA, 20 bp, Artificial Sequence
  Description of Artificial Sequence: Synthetic oligonucleotide
  Target: LAMA2; (+) strand; PAM type: YTN; PAM sequence: TTT
tagaggataatgaaactatg

SEQ ID NO: 412133 - DNA, 20 bp, Artificial Sequence
  Description of Artificial Sequence: Synthetic oligonucleotide
  Target: LAMA2; (+) strand; PAM type: YTN; PAM sequence: TTT
agaggataatgaaactatga

SEQ ID NO: 412134 - DNA, 20 bp, Artificial Sequence
  Description of Artificial Sequence: Synthetic oligonucleotide
  Target: LAMA2; (+) strand; PAM type: YTN; PAM sequence: TTA
gaggataatgaaactatgag

SEQ ID NO: 412135 - DNA, 20 bp, Artificial Sequence
  Description of Artificial Sequence: Synthetic oligonucleotide
  Target: LAMA2; (+) strand; PAM type: YTN; PAM sequence: CTA
tgagttaatcaataaatatg

SEQ ID NO: 412136 - DNA, 20 bp, Artificial Sequence
  Description of Artificial Sequence: Synthetic oligonucleotide
  Target: LAMA2; (+) strand; PAM type: YTN; PAM sequence: TTA
atcaataaatatgtctgagc

SEQ ID NO: 412137 - DNA, 20 bp, Artificial Sequence
  Description of Artificial Sequence: Synthetic oligonucleotide
  Target: LAMA2; (+) strand; PAM type: YTN; PAM sequence: CTG
agcacattcctttagccatt

SEQ ID NO: 412138 - DNA, 20 bp, Artificial Sequence
  Description of Artificial Sequence: Synthetic oligonucleotide
  Target: LAMA2; (+) strand; PAM type: YTN; PAM sequence: TTC
ctttagccattccagggtgt

SEQ ID NO: 412139 - DNA, 20 bp, Artificial Sequence
  Description of Artificial Sequence: Synthetic oligonucleotide
  Target: LAMA2; (+) strand; PAM type: YTN; PAM sequence: CTT
tagccattccagggtgtgat

SEQ ID NO: 412140 - DNA, 20 bp, Artificial Sequence
  Description of Artificial Sequence: Synthetic oligonucleotide
  Target: LAMA2; (+) strand; PAM type: YTN; PAM sequence: TTT
agccattccagggtgtgata

SEQ ID NO: 412141 - DNA, 20 bp, Artificial Sequence
  Description of Artificial Sequence: Synthetic oligonucleotide
  Target: LAMA2; (+) strand; PAM type: YTN; PAM sequence: TTA
gccattccagggtgtgatat

SEQ ID NO: 412142 - DNA, 20 bp, Artificial Sequence
  Description of Artificial Sequence: Synthetic oligonucleotide
  Target: LAMA2; (+) strand; PAM type: YTN; PAM sequence: TTC
cagggtgtgatatgagaaaa

SEQ ID NO: 412143 - DNA, 20 bp, Artificial Sequence
  Description of Artificial Sequence: Synthetic oligonucleotide
  Target: LAMA2; (+) strand; PAM type: YTN; PAM sequence: CTG
attcacacgcactgagcact

SEQ ID NO: 412144 - DNA, 20 bp, Artificial Sequence
  Description of Artificial Sequence: Synthetic oligonucleotide
  Target: LAMA2; (+) strand; PAM type: YTN; PAM sequence: TTC
acacgcactgagcactcaat

SEQ ID NO: 412145 - DNA, 20 bp, Artificial Sequence
  Description of Artificial Sequence: Synthetic oligonucleotide
  Target: LAMA2; (+) strand; PAM type: YTN; PAM sequence: CTG
agcactcaataataagtact

SEQ ID NO: 412146 - DNA, 20 bp, Artificial Sequence
  Description of Artificial Sequence: Synthetic oligonucleotide
  Target: LAMA2; (+) strand; PAM type: YTN; PAM sequence: CTC
aataataagtacttactatg

SEQ ID NO: 412147 - DNA, 20 bp, Artificial Sequence
  Description of Artificial Sequence: Synthetic oligonucleotide
  Target: LAMA2; (+) strand; PAM type: YTN; PAM sequence: CTT
actatgcagtagactacaga

SEQ ID NO: 412148 - DNA, 20 bp, Artificial Sequence
  Description of Artificial Sequence: Synthetic oligonucleotide
  Target: LAMA2; (+) strand; PAM type: YTN; PAM sequence: TTA
ctatgcagtagactacagag

SEQ ID NO: 412149 - DNA, 20 bp, Artificial Sequence
  Description of Artificial Sequence: Synthetic oligonucleotide
  Target: LAMA2; (+) strand; PAM type: YTN; PAM sequence: CTA
tgcagtagactacagagatg

SEQ ID NO: 412150 - DNA, 20 bp, Artificial Sequence
  Description of Artificial Sequence: Synthetic oligonucleotide
  Target: LAMA2; (+) strand; PAM type: YTN; PAM sequence: CTA
cagagatgaataatgtagtt

SEQ ID NO: 412151 - DNA, 20 bp, Artificial Sequence
  Description of Artificial Sequence: Synthetic oligonucleotide
  Target: LAMA2; (+) strand; PAM type: YTN; PAM sequence: TTT
ttattcttaaagaattacgc

SEQ ID NO: 412152 - DNA, 20 bp, Artificial Sequence
  Description of Artificial Sequence: Synthetic oligonucleotide
  Target: LAMA2; (+) strand; PAM type: YTN; PAM sequence: TTT
tattcttaaagaattacgct

SEQ ID NO: 412153 - DNA, 20 bp, Artificial Sequence
  Description of Artificial Sequence: Synthetic oligonucleotide
  Target: LAMA2; (+) strand; PAM type: YTN; PAM sequence: TTT
attcttaaagaattacgcta

SEQ ID NO: 412154 - DNA, 20 bp, Artificial Sequence
  Description of Artificial Sequence: Synthetic oligonucleotide
  Target: LAMA2; (+) strand; PAM type: YTN; PAM sequence: TTA
ttcttaaagaattacgctaa

SEQ ID NO: 412155 - DNA, 20 bp, Artificial Sequence
  Description of Artificial Sequence: Synthetic oligonucleotide
  Target: LAMA2; (+) strand; PAM type: YTN; PAM sequence: TTC
ttaaagaattacgctaatat

SEQ ID NO: 412156 - DNA, 20 bp, Artificial Sequence
  Description of Artificial Sequence: Synthetic oligonucleotide
  Target: LAMA2; (+) strand; PAM type: YTN; PAM sequence: CTT
aaagaattacgctaatatgt

SEQ ID NO: 412157 - DNA, 20 bp, Artificial Sequence
  Description of Artificial Sequence: Synthetic oligonucleotide
  Target: LAMA2; (+) strand; PAM type: YTN; PAM sequence: TTA
aagaattacgctaatatgta

SEQ ID NO: 412158 - DNA, 20 bp, Artificial Sequence
  Description of Artificial Sequence: Synthetic oligonucleotide
  Target: LAMA2; (+) strand; PAM type: YTN; PAM sequence: TTA
cgctaatatgtaagaaacaa

SEQ ID NO: 412159 - DNA, 20 bp, Artificial Sequence
  Description of Artificial Sequence: Synthetic oligonucleotide
  Target: LAMA2; (+) strand; PAM type: YTN; PAM sequence: CTA
atatgtaagaaacaattaga

SEQ ID NO: 412160 - DNA, 20 bp, Artificial Sequence
  Description of Artificial Sequence: Synthetic oligonucleotide
  Target: LAMA2; (+) strand; PAM type: YTN; PAM sequence: TTA
gacagcatcattaccttttt

SEQ ID NO: 412161 - DNA, 20 bp, Artificial Sequence
  Description of Artificial Sequence: Synthetic oligonucleotide
  Target: LAMA2; (+) strand; PAM type: YTN; PAM sequence: TTA
cctttttaaagaacagtcca

SEQ ID NO: 412162 - DNA, 20 bp, Artificial Sequence
  Description of Artificial Sequence: Synthetic oligonucleotide
  Target: LAMA2; (+) strand; PAM type: YTN; PAM sequence: CTT
tttaaagaacagtccataat

SEQ ID NO: 412163 - DNA, 20 bp, Artificial Sequence
  Description of Artificial Sequence: Synthetic oligonucleotide
  Target: LAMA2; (+) strand; PAM type: YTN; PAM sequence: TTT
ttaaagaacagtccataatc

SEQ ID NO: 412164 - DNA, 20 bp, Artificial Sequence
  Description of Artificial Sequence: Synthetic oligonucleotide
  Target: LAMA2; (+) strand; PAM type: YTN; PAM sequence: TTT
taaagaacagtccataatct

SEQ ID NO: 412165 - DNA, 20 bp, Artificial Sequence
  Description of Artificial Sequence: Synthetic oligonucleotide
  Target: LAMA2; (+) strand; PAM type: YTN; PAM sequence: TTT
aaagaacagtccataatctc

SEQ ID NO: 412166 - DNA, 20 bp, Artificial Sequence
  Description of Artificial Sequence: Synthetic oligonucleotide
  Target: LAMA2; (+) strand; PAM type: YTN; PAM sequence: TTA
aagaacagtccataatctcc

SEQ ID NO: 412167 - DNA, 20 bp, Artificial Sequence
  Description of Artificial Sequence: Synthetic oligonucleotide
  Target: LAMA2; (+) strand; PAM type: YTN; PAM sequence: CTC
ctgtttttctctcctgggta

SEQ ID NO: 412168 - DNA, 20 bp, Artificial Sequence
  Description of Artificial Sequence: Synthetic oligonucleotide
  Target: LAMA2; (+) strand; PAM type: YTN; PAM sequence: CTG
tttttctctcctgggtattt

SEQ ID NO: 412169 - DNA, 20 bp, Artificial Sequence
  Description of Artificial Sequence: Synthetic oligonucleotide
  Target: LAMA2; (+) strand; PAM type: YTN; PAM sequence: TTT
ttctctcctgggtattttac

SEQ ID NO: 412170 - DNA, 20 bp, Artificial Sequence
  Description of Artificial Sequence: Synthetic oligonucleotide
  Target: LAMA2; (+) strand; PAM type: YTN; PAM sequence: TTT
tctctcctgggtattttaca

SEQ ID NO: 412171 - DNA, 20 bp, Artificial Sequence
  Description of Artificial Sequence: Synthetic oligonucleotide
  Target: LAMA2; (+) strand; PAM type: YTN; PAM sequence: TTT
ctctcctgggtattttacag

SEQ ID NO: 412172 - DNA, 20 bp, Artificial Sequence
  Description of Artificial Sequence: Synthetic oligonucleotide
  Target: LAMA2; (+) strand; PAM type: YTN; PAM sequence: TTC
tctcctgggtattttacagg

SEQ ID NO: 412173 - DNA, 20 bp, Artificial Sequence
  Description of Artificial Sequence: Synthetic oligonucleotide
  Target: LAMA2; (+) strand; PAM type: YTN; PAM sequence: CTC
tcctgggtattttacagggt

SEQ ID NO: 412174 - DNA, 20 bp, Artificial Sequence
  Description of Artificial Sequence: Synthetic oligonucleotide
  Target: LAMA2; (+) strand; PAM type: YTN; PAM sequence: CTC
ctgggtattttacagggtcc

SEQ ID NO: 412175 - DNA, 20 bp, Artificial Sequence
  Description of Artificial Sequence: Synthetic oligonucleotide
  Target: LAMA2; (+) strand; PAM type: YTN; PAM sequence: CTG
ggtattttacagggtccttg

SEQ ID NO: 412176 - DNA, 20 bp, Artificial Sequence
  Description of Artificial Sequence: Synthetic oligonucleotide
  Target: LAMA2; (+) strand; PAM type: YTN; PAM sequence: TTT
tacagggtccttgtgctgca

SEQ ID NO: 412177 - DNA, 20 bp, Artificial Sequence
  Description of Artificial Sequence: Synthetic oligonucleotide
  Target: LAMA2; (+) strand; PAM type: YTN; PAM sequence: TTT
acagggtccttgtgctgcag

SEQ ID NO: 412178 - DNA, 20 bp, Artificial Sequence
  Description of Artificial Sequence: Synthetic oligonucleotide
  Target: LAMA2; (+) strand; PAM type: YTN; PAM sequence: TTA
cagggtccttgtgctgcaga

SEQ ID NO: 412179 - DNA, 20 bp, Artificial Sequence
  Description of Artificial Sequence: Synthetic oligonucleotide
  Target: LAMA2; (+) strand; PAM type: YTN; PAM sequence: CTT
gtgctgcagaatcagaacca

SEQ ID NO: 412180 - DNA, 20 bp, Artificial Sequence
  Description of Artificial Sequence: Synthetic oligonucleotide
  Target: LAMA2; (+) strand; PAM type: YTN; PAM sequence: TTG
tgctgcagaatcagaaccag

SEQ ID NO: 412181 - DNA, 20 bp, Artificial Sequence
  Description of Artificial Sequence: Synthetic oligonucleotide
  Target: LAMA2; (+) strand; PAM type: YTN; PAM sequence: CTG
cagaatcagaaccagctctt

SEQ ID NO: 412182 - DNA, 20 bp, Artificial Sequence
  Description of Artificial Sequence: Synthetic oligonucleotide
  Target: LAMA2; (+) strand; PAM type: YTN; PAM sequence: CTC
ttttgatagggagcaagcag

SEQ ID NO: 412183 - DNA, 20 bp, Artificial Sequence
  Description of Artificial Sequence: Synthetic oligonucleotide
  Target: LAMA2; (+) strand; PAM type: YTN; PAM sequence: CTT
ttgatagggagcaagcagtt

SEQ ID NO: 412184 - DNA, 20 bp, Artificial Sequence
  Description of Artificial Sequence: Synthetic oligonucleotide
  Target: LAMA2; (+) strand; PAM type: YTN; PAM sequence: TTT
tgatagggagcaagcagttc

SEQ ID NO: 412185 - DNA, 20 bp, Artificial Sequence
  Description of Artificial Sequence: Synthetic oligonucleotide
  Target: LAMA2; (+) strand; PAM type: YTN; PAM sequence: TTT
gatagggagcaagcagttcg

SEQ ID NO: 412186 - DNA, 20 bp, Artificial Sequence
  Description of Artificial Sequence: Synthetic oligonucleotide
  Target: LAMA2; (+) strand; PAM type: YTN; PAM sequence: TTG
atagggagcaagcagttcgg

SEQ ID NO: 412187 - DNA, 20 bp, Artificial Sequence
  Description of Artificial Sequence: Synthetic oligonucleotide
  Target: LAMA2; (+) strand; PAM type: YTN; PAM sequence: TTC
gggctttcaagaaacagtca

SEQ ID NO: 412188 - DNA, 20 bp, Artificial Sequence
  Description of Artificial Sequence: Synthetic oligonucleotide
  Target: LAMA2; (+) strand; PAM type: YTN; PAM sequence: CTT
tcaagaaacagtcacattgc

SEQ ID NO: 412189 - DNA, 20 bp, Artificial Sequence
  Description of Artificial Sequence: Synthetic oligonucleotide
  Target: LAMA2; (+) strand; PAM type: YTN; PAM sequence: TTT
caagaaacagtcacattgca

SEQ ID NO: 412190 - DNA, 20 bp, Artificial Sequence
  Description of Artificial Sequence: Synthetic oligonucleotide
  Target: LAMA2; (+) strand; PAM type: YTN; PAM sequence: TTC
aagaaacagtcacattgcaa

SEQ ID NO: 412191 - DNA, 20 bp, Artificial Sequence
  Description of Artificial Sequence: Synthetic oligonucleotide
  Target: LAMA2; (+) strand; PAM type: YTN; PAM sequence: TTG
caattgcatttgatgacacc

SEQ ID NO: 412192 - DNA, 20 bp, Artificial Sequence
  Description of Artificial Sequence: Synthetic oligonucleotide
  Target: LAMA2; (+) strand; PAM type: YTN; PAM sequence: TTG
catttgatgacaccaaagtt

SEQ ID NO: 412193 - DNA, 20 bp, Artificial Sequence
  Description of Artificial Sequence: Synthetic oligonucleotide
  Target: LAMA2; (+) strand; PAM type: YTN; PAM sequence: TTT
gatgacaccaaagttaaaaa

SEQ ID NO: 412194 - DNA, 20 bp, Artificial Sequence
  Description of Artificial Sequence: Synthetic oligonucleotide
  Target: LAMA2; (+) strand; PAM type: YTN; PAM sequence: TTG
atgacaccaaagttaaaaac

SEQ ID NO: 412195 - DNA, 20 bp, Artificial Sequence
  Description of Artificial Sequence: Synthetic oligonucleotide
  Target: LAMA2; (+) strand; PAM type: YTN; PAM sequence: TTA
aaaaccggtatgtatcatcc

SEQ ID NO: 412196 - DNA, 20 bp, Artificial Sequence
  Description of Artificial Sequence: Synthetic oligonucleotide
  Target: LAMA2; (+) strand; PAM type: YTN; PAM sequence: CTG
agacactgggaaagaaccga

SEQ ID NO: 412197 - DNA, 20 bp, Artificial Sequence
  Description of Artificial Sequence: Synthetic oligonucleotide
  Target: LAMA2; (+) strand; PAM type: YTN; PAM sequence: CTG
ggaaagaaccgataaatgaa

SEQ ID NO: 412198 - DNA, 20 bp, Artificial Sequence
  Description of Artificial Sequence: Synthetic oligonucleotide
  Target: LAMA2; (+) strand; PAM type: YTN; PAM sequence: CTG
agtatttgtgtttaatcaag

SEQ ID NO: 412199 - DNA, 20 bp, Artificial Sequence
  Description of Artificial Sequence: Synthetic oligonucleotide
  Target: LAMA2; (+) strand; PAM type: YTN; PAM sequence: TTT
gtgtttaatcaagttgaatc

SEQ ID NO: 412200 - DNA, 20 bp, Artificial Sequence
  Description of Artificial Sequence: Synthetic oligonucleotide
  Target: LAMA2; (+) strand; PAM type: YTN; PAM sequence: TTG
tgtttaatcaagttgaatct

SEQ ID NO: 412201 - DNA, 20 bp, Artificial Sequence
  Description of Artificial Sequence: Synthetic oligonucleotide
  Target: LAMA2; (+) strand; PAM type: YTN; PAM sequence: TTT
aatcaagttgaatctactac

SEQ ID NO: 412202 - DNA, 20 bp, Artificial Sequence
  Description of Artificial Sequence: Synthetic oligonucleotide
  Target: LAMA2; (+) strand; PAM type: YTN; PAM sequence: TTA
atcaagttgaatctactaca

SEQ ID NO: 412203 - DNA, 20 bp, Artificial Sequence
  Description of Artificial Sequence: Synthetic oligonucleotide
  Target: LAMA2; (+) strand; PAM type: YTN; PAM sequence: TTG
aatctactacacttattaat

SEQ ID NO: 412204 - DNA, 20 bp, Artificial Sequence
  Description of Artificial Sequence: Synthetic oligonucleotide
  Target: LAMA2; (+) strand; PAM type: YTN; PAM sequence: CTA
ctacacttattaattaatga

SEQ ID NO: 412205 - DNA, 20 bp, Artificial Sequence
  Description of Artificial Sequence: Synthetic oligonucleotide
  Target: LAMA2; (+) strand; PAM type: YTN; PAM sequence: CTA
cacttattaattaatgaagt

SEQ ID NO: 412206 - DNA, 20 bp, Artificial Sequence
  Description of Artificial Sequence: Synthetic oligonucleotide
  Target: LAMA2; (+) strand; PAM type: YTN; PAM sequence: CTT
attaattaatgaagttagct

SEQ ID NO: 412207 - DNA, 20 bp, Artificial Sequence
  Description of Artificial Sequence: Synthetic oligonucleotide
  Target: LAMA2; (+) strand; PAM type: YTN; PAM sequence: TTA
ttaattaatgaagttagctt

SEQ ID NO: 412208 - DNA, 20 bp, Artificial Sequence
  Description of Artificial Sequence: Synthetic oligonucleotide
  Target: LAMA2; (+) strand; PAM type: YTN; PAM sequence: TTA
attaatgaagttagcttttc

SEQ ID NO: 412209 - DNA, 20 bp, Artificial Sequence
  Description of Artificial Sequence: Synthetic oligonucleotide
  Target: LAMA2; (+) strand; PAM type: YTN; PAM sequence: TTA
atgaagttagcttttctttt

SEQ ID NO: 412210 - DNA, 20 bp, Artificial Sequence
  Description of Artificial Sequence: Synthetic oligonucleotide
  Target: LAMA2; (+) strand; PAM type: YTN; PAM sequence: TTA
gcttttcttttattcactga

SEQ ID NO: 412211 - DNA, 20 bp, Artificial Sequence
  Description of Artificial Sequence: Synthetic oligonucleotide
  Target: LAMA2; (+) strand; PAM type: YTN; PAM sequence: CTT
ttcttttattcactgagtac

SEQ ID NO: 412212 - DNA, 20 bp, Artificial Sequence
  Description of Artificial Sequence: Synthetic oligonucleotide
  Target: LAMA2; (+) strand; PAM type: YTN; PAM sequence: TTT
tcttttattcactgagtaca

SEQ ID NO: 412213 - DNA, 20 bp, Artificial Sequence
  Description of Artificial Sequence: Synthetic oligonucleotide
  Target: LAMA2; (+) strand; PAM type: YTN; PAM sequence: TTT
cttttattcactgagtacaa

SEQ ID NO: 412214 - DNA, 20 bp, Artificial Sequence
  Description of Artificial Sequence: Synthetic oligonucleotide
  Target: LAMA2; (+) strand; PAM type: YTN; PAM sequence: TTC
ttttattcactgagtacaat

SEQ ID NO: 412215 - DNA, 20 bp, Artificial Sequence
  Description of Artificial Sequence: Synthetic oligonucleotide
  Target: LAMA2; (+) strand; PAM type: YTN; PAM sequence: CTT
ttattcactgagtacaatag

SEQ ID NO: 412216 - DNA, 20 bp, Artificial Sequence
  Description of Artificial Sequence: Synthetic oligonucleotide
  Target: LAMA2; (+) strand; PAM type: YTN; PAM sequence: TTT
tattcactgagtacaataga

SEQ ID NO: 412217 - DNA, 20 bp, Artificial Sequence
  Description of Artificial Sequence: Synthetic oligonucleotide
  Target: LAMA2; (+) strand; PAM type: YTN; PAM sequence: TTT
attcactgagtacaatagag

SEQ ID NO: 412218 - DNA, 20 bp, Artificial Sequence
  Description of Artificial Sequence: Synthetic oligonucleotide
  Target: LAMA2; (+) strand; PAM type: YTN; PAM sequence: TTA
ttcactgagtacaatagaga

SEQ ID NO: 412219 - DNA, 20 bp, Artificial Sequence
  Description of Artificial Sequence: Synthetic oligonucleotide
  Target: LAMA2; (+) strand; PAM type: YTN; PAM sequence: TTC
actgagtacaatagagaata

SEQ ID NO: 412220 - DNA, 20 bp, Artificial Sequence
  Description of Artificial Sequence: Synthetic oligonucleotide
  Target: LAMA2; (+) strand; PAM type: YTN; PAM sequence: CTG
agtacaatagagaatagaat

SEQ ID NO: 412221 - DNA, 20 bp, Artificial Sequence
  Description of Artificial Sequence: Synthetic oligonucleotide
  Target: LAMA2; (+) strand; PAM type: YTN; PAM sequence: TTT
tatttgtctgagcctgagga

SEQ ID NO: 412222 - DNA, 20 bp, Artificial Sequence
  Description of Artificial Sequence: Synthetic oligonucleotide
  Target: LAMA2; (+) strand; PAM type: YTN; PAM sequence: TTT
atttgtctgagcctgaggag

SEQ ID NO: 412223 - DNA, 20 bp, Artificial Sequence
  Description of Artificial Sequence: Synthetic oligonucleotide
  Target: LAMA2; (+) strand; PAM type: YTN; PAM sequence: TTA
tttgtctgagcctgaggagc

SEQ ID NO: 412224 - DNA, 20 bp, Artificial Sequence
  Description of Artificial Sequence: Synthetic oligonucleotide
  Target: LAMA2; (+) strand; PAM type: YTN; PAM sequence: TTT
gtctgagcctgaggagccca

SEQ ID NO: 412225 - DNA, 20 bp, Artificial Sequence
  Description of Artificial Sequence: Synthetic oligonucleotide
  Target: LAMA2; (+) strand; PAM type: YTN; PAM sequence: TTG
tctgagcctgaggagcccaa

SEQ ID NO: 412226 - DNA, 20 bp, Artificial Sequence
  Description of Artificial Sequence: Synthetic oligonucleotide
  Target: LAMA2; (+) strand; PAM type: YTN; PAM sequence: CTG
agcctgaggagcccaattta

SEQ ID NO: 412227 - DNA, 20 bp, Artificial Sequence
  Description of Artificial Sequence: Synthetic oligonucleotide
  Target: LAMA2; (+) strand; PAM type: YTN; PAM sequence: CTG
aggagcccaatttaggaaat

SEQ ID NO: 412228 - DNA, 20 bp, Artificial Sequence
  Description of Artificial Sequence: Synthetic oligonucleotide
  Target: LAMA2; (+) strand; PAM type: YTN; PAM sequence: TTT
aggaaatcagtagcctgata

SEQ ID NO: 412229 - DNA, 20 bp, Artificial Sequence
  Description of Artificial Sequence: Synthetic oligonucleotide
  Target: LAMA2; (+) strand; PAM type: YTN; PAM sequence: TTA
ggaaatcagtagcctgataa

SEQ ID NO: 412230 - DNA, 20 bp, Artificial Sequence
  Description of Artificial Sequence: Synthetic oligonucleotide
  Target: LAMA2; (+) strand; PAM type: YTN; PAM sequence: CTG
ataaagtcctcatctctgag

SEQ ID NO: 412231 - DNA, 20 bp, Artificial Sequence
  Description of Artificial Sequence: Synthetic oligonucleotide
  Target: LAMA2; (+) strand; PAM type: YTN; PAM sequence: CTC
atctctgagaaggttttact

SEQ ID NO: 412232 - DNA, 20 bp, Artificial Sequence
  Description of Artificial Sequence: Synthetic oligonucleotide
  Target: LAMA2; (+) strand; PAM type: YTN; PAM sequence: CTC
tgagaaggttttactctcct

SEQ ID NO: 412233 - DNA, 20 bp, Artificial Sequence
  Description of Artificial Sequence: Synthetic oligonucleotide
  Target: LAMA2; (+) strand; PAM type: YTN; PAM sequence: CTG
agaaggttttactctccttt

SEQ ID NO: 412234 - DNA, 20 bp, Artificial Sequence
  Description of Artificial Sequence: Synthetic oligonucleotide
  Target: LAMA2; (+) strand; PAM type: YTN; PAM sequence: TTT
tactctcctttatgaaaatg

SEQ ID NO: 412235 - DNA, 20 bp, Artificial Sequence
  Description of Artificial Sequence: Synthetic oligonucleotide
  Target: LAMA2; (+) strand; PAM type: YTN; PAM sequence: TTT
actctcctttatgaaaatgc

SEQ ID NO: 412236 - DNA, 20 bp, Artificial Sequence
  Description of Artificial Sequence: Synthetic oligonucleotide
  Target: LAMA2; (+) strand; PAM type: YTN; PAM sequence: TTA
ctctcctttatgaaaatgca

SEQ ID NO: 412237 - DNA, 20 bp, Artificial Sequence
  Description of Artificial Sequence: Synthetic oligonucleotide
  Target: LAMA2; (+) strand; PAM type: YTN; PAM sequence: CTC
tcctttatgaaaatgcagcc

SEQ ID NO: 412238 - DNA, 20 bp, Artificial Sequence
  Description of Artificial Sequence: Synthetic oligonucleotide
  Target: LAMA2; (+) strand; PAM type: YTN; PAM sequence: CTC
ctttatgaaaatgcagccac

SEQ ID NO: 412239 - DNA, 20 bp, Artificial Sequence
  Description of Artificial Sequence: Synthetic oligonucleotide
  Target: LAMA2; (+) strand; PAM type: YTN; PAM sequence: CTT
tatgaaaatgcagccacgat

SEQ ID NO: 412240 - DNA, 20 bp, Artificial Sequence
  Description of Artificial Sequence: Synthetic oligonucleotide
  Target: LAMA2; (+) strand; PAM type: YTN; PAM sequence: TTT
atgaaaatgcagccacgatc

SEQ ID NO: 412241 - DNA, 20 bp, Artificial Sequence
  Description of Artificial Sequence: Synthetic oligonucleotide
  Target: LAMA2; (+) strand; PAM type: YTN; PAM sequence: TTA
tgaaaatgcagccacgatct

SEQ ID NO: 412242 - DNA, 20 bp, Artificial Sequence
  Description of Artificial Sequence: Synthetic oligonucleotide
  Target: LAMA2; (+) strand; PAM type: YTN; PAM sequence: CTG
ataccgctctattttagcat

SEQ ID NO: 412243 - DNA, 20 bp, Artificial Sequence
  Description of Artificial Sequence: Synthetic oligonucleotide
  Target: LAMA2; (+) strand; PAM type: YTN; PAM sequence: CTC
tattttagcatgagaatgct

SEQ ID NO: 412244 - DNA, 20 bp, Artificial Sequence
  Description of Artificial Sequence: Synthetic oligonucleotide
  Target: LAMA2; (+) strand; PAM type: YTN; PAM sequence: CTA
ttttagcatgagaatgctgt

SEQ ID NO: 412245 - DNA, 20 bp, Artificial Sequence
  Description of Artificial Sequence: Synthetic oligonucleotide
  Target: LAMA2; (+) strand; PAM type: YTN; PAM sequence: TTT
tagcatgagaatgctgttat

SEQ ID NO: 412246 - DNA, 20 bp, Artificial Sequence
  Description of Artificial Sequence: Synthetic oligonucleotide
  Target: LAMA2; (+) strand; PAM type: YTN; PAM sequence: TTT
agcatgagaatgctgttatt

SEQ ID NO: 412247 - DNA, 20 bp, Artificial Sequence
  Description of Artificial Sequence: Synthetic oligonucleotide
  Target: LAMA2; (+) strand; PAM type: YTN; PAM sequence: TTA
gcatgagaatgctgttattt

SEQ ID NO: 412248 - DNA, 20 bp, Artificial Sequence
  Description of Artificial Sequence: Synthetic oligonucleotide
  Target: LAMA2; (+) strand; PAM type: YTN; PAM sequence: CTG
ttatttttctgtttgacttt

SEQ ID NO: 412249 - DNA, 20 bp, Artificial Sequence
  Description of Artificial Sequence: Synthetic oligonucleotide
  Target: LAMA2; (+) strand; PAM type: YTN; PAM sequence: TTA
tttttctgtttgactttgca

SEQ ID NO: 412250 - DNA, 20 bp, Artificial Sequence
  Description of Artificial Sequence: Synthetic oligonucleotide
  Target: LAMA2; (+) strand; PAM type: YTN; PAM sequence: TTT
ttctgtttgactttgcatgc

SEQ ID NO: 412251 - DNA, 20 bp, Artificial Sequence
  Description of Artificial Sequence: Synthetic oligonucleotide
  Target: LAMA2; (+) strand; PAM type: YTN; PAM sequence: TTT
tctgtttgactttgcatgct

SEQ ID NO: 412252 - DNA, 20 bp, Artificial Sequence
  Description of Artificial Sequence: Synthetic oligonucleotide
  Target: LAMA2; (+) strand; PAM type: YTN; PAM sequence: TTT
ctgtttgactttgcatgctt

SEQ ID NO: 412253 - DNA, 20 bp, Artificial Sequence
  Description of Artificial Sequence: Synthetic oligonucleotide
  Target: LAMA2; (+) strand; PAM type: YTN; PAM sequence: TTC
tgtttgactttgcatgcttt

SEQ ID NO: 412254 - DNA, 20 bp, Artificial Sequence
  Description of Artificial Sequence: Synthetic oligonucleotide
  Target: LAMA2; (+) strand; PAM type: YTN; PAM sequence: CTG
tttgactttgcatgcttttg

SEQ ID NO: 412255 - DNA, 20 bp, Artificial Sequence
  Description of Artificial Sequence: Synthetic oligonucleotide
  Target: LAMA2; (+) strand; PAM type: YTN; PAM sequence: TTT
gactttgcatgcttttgttt

SEQ ID NO: 412256 - DNA, 20 bp, Artificial Sequence
  Description of Artificial Sequence: Synthetic oligonucleotide
  Target: LAMA2; (+) strand; PAM type: YTN; PAM sequence: TTG
actttgcatgcttttgtttc

SEQ ID NO: 412257 - DNA, 20 bp, Artificial Sequence
  Description of Artificial Sequence: Synthetic oligonucleotide
  Target: LAMA2; (+) strand; PAM type: YTN; PAM sequence: CTT
tgcatgcttttgtttcacag

SEQ ID NO: 412258 - DNA, 20 bp, Artificial Sequence
  Description of Artificial Sequence: Synthetic oligonucleotide
  Target: LAMA2; (+) strand; PAM type: YTN; PAM sequence: TTT
gcatgcttttgtttcacagt

SEQ ID NO: 412259 - DNA, 20 bp, Artificial Sequence
  Description of Artificial Sequence: Synthetic oligonucleotide
  Target: LAMA2; (+) strand; PAM type: YTN; PAM sequence: TTG
catgcttttgtttcacagtc

SEQ ID NO: 412260 - DNA, 20 bp, Artificial Sequence
  Description of Artificial Sequence: Synthetic oligonucleotide
  Target: LAMA2; (+) strand; PAM type: YTN; PAM sequence: CTT
ttgtttcacagtctcacaat

SEQ ID NO: 412261 - DNA, 20 bp, Artificial Sequence
  Description of Artificial Sequence: Synthetic oligonucleotide
  Target: LAMA2; (+) strand; PAM type: YTN; PAM sequence: TTT
tgtttcacagtctcacaatt

SEQ ID NO: 412262 - DNA, 20 bp, Artificial Sequence
  Description of Artificial Sequence: Synthetic oligonucleotide
  Target: LAMA2; (+) strand; PAM type: YTN; PAM sequence: TTT
gtttcacagtctcacaattg

SEQ ID NO: 412263 - DNA, 20 bp, Artificial Sequence
  Description of Artificial Sequence: Synthetic oligonucleotide
  Target: LAMA2; (+) strand; PAM type: YTN; PAM sequence: TTG
tttcacagtctcacaattga

SEQ ID NO: 412264 - DNA, 20 bp, Artificial Sequence
  Description of Artificial Sequence: Synthetic oligonucleotide
  Target: LAMA2; (+) strand; PAM type: YTN; PAM sequence: TTT
cacagtctcacaattgagtt

SEQ ID NO: 412265 - DNA, 20 bp, Artificial Sequence
  Description of Artificial Sequence: Synthetic oligonucleotide
  Target: LAMA2; (+) strand; PAM type: YTN; PAM sequence: TTC
acagtctcacaattgagttg

SEQ ID NO: 412266 - DNA, 20 bp, Artificial Sequence
  Description of Artificial Sequence: Synthetic oligonucleotide
  Target: LAMA2; (+) strand; PAM type: YTN; PAM sequence: CTC
acaattgagttggaagtaag

SEQ ID NO: 412267 - DNA, 20 bp, Artificial Sequence
  Description of Artificial Sequence: Synthetic oligonucleotide
  Target: LAMA2; (+) strand; PAM type: YTN; PAM sequence: TTG
agttggaagtaagaaccgaa

SEQ ID NO: 412268 - DNA, 20 bp, Artificial Sequence
  Description of Artificial Sequence: Synthetic oligonucleotide
  Target: LAMA2; (+) strand; PAM type: YTN; PAM sequence: TTG
gaagtaagaaccgaagctga

SEQ ID NO: 412269 - DNA, 20 bp, Artificial Sequence
  Description of Artificial Sequence: Synthetic oligonucleotide
  Target: LAMA2; (+) strand; PAM type: YTN; PAM sequence: CTG
aatccggcttgcttttttac

SEQ ID NO: 412270 - DNA, 20 bp, Artificial Sequence
  Description of Artificial Sequence: Synthetic oligonucleotide
  Target: LAMA2; (+) strand; PAM type: YTN; PAM sequence: CTT
gcttttttacatggctcgca

SEQ ID NO: 412271 - DNA, 20 bp, Artificial Sequence
  Description of Artificial Sequence: Synthetic oligonucleotide
  Target: LAMA2; (+) strand; PAM type: YTN; PAM sequence: TTG
cttttttacatggctcgcat

SEQ ID NO: 412272 - DNA, 20 bp, Artificial Sequence
  Description of Artificial Sequence: Synthetic oligonucleotide
  Target: LAMA2; (+) strand; PAM type: YTN; PAM sequence: CTT
ttttacatggctcgcatcaa

SEQ ID NO: 412273 - DNA, 20 bp, Artificial Sequence
  Description of Artificial Sequence: Synthetic oligonucleotide
  Target: LAMA2; (+) strand; PAM type: YTN; PAM sequence: TTT
tttacatggctcgcatcaat

SEQ ID NO: 412274 - DNA, 20 bp, Artificial Sequence
  Description of Artificial Sequence: Synthetic oligonucleotide
  Target: LAMA2; (+) strand; PAM type: YTN; PAM sequence: TTT
ttacatggctcgcatcaatc

SEQ ID NO: 412275 - DNA, 20 bp, Artificial Sequence
  Description of Artificial Sequence: Synthetic oligonucleotide
  Target: LAMA2; (+) strand; PAM type: YTN; PAM sequence: TTT
tacatggctcgcatcaatca

SEQ ID NO: 412276 - DNA, 20 bp, Artificial Sequence
  Description of Artificial Sequence: Synthetic oligonucleotide
  Target: LAMA2; (+) strand; PAM type: YTN; PAM sequence: TTT
acatggctcgcatcaatcat

SEQ ID NO: 412277 - DNA, 20 bp, Artificial Sequence
  Description of Artificial Sequence: Synthetic oligonucleotide
  Target: LAMA2; (+) strand; PAM type: YTN; PAM sequence: TTA
catggctcgcatcaatcatg

SEQ ID NO: 412278 - DNA, 20 bp, Artificial Sequence
  Description of Artificial Sequence: Synthetic oligonucleotide
  Target: LAMA2; (+) strand; PAM type: YTN; PAM sequence: CTC
gcatcaatcatgctgatttt

SEQ ID NO: 412279 - DNA, 20 bp, Artificial Sequence
  Description of Artificial Sequence: Synthetic oligonucleotide
  Target: LAMA2; (+) strand; PAM type: YTN; PAM sequence: CTG
attttgcaacagttcagctg

SEQ ID NO: 412280 - DNA, 20 bp, Artificial Sequence
  Description of Artificial Sequence: Synthetic oligonucleotide
  Target: LAMA2; (+) strand; PAM type: YTN; PAM sequence: TTT
tgcaacagttcagctgagaa

SEQ ID NO: 412281 - DNA, 20 bp, Artificial Sequence
  Description of Artificial Sequence: Synthetic oligonucleotide
  Target: LAMA2; (+) strand; PAM type: YTN; PAM sequence: TTT
gcaacagttcagctgagaaa

SEQ ID NO: 412282 - DNA, 20 bp, Artificial Sequence
  Description of Artificial Sequence: Synthetic oligonucleotide
  Target: LAMA2; (+) strand; PAM type: YTN; PAM sequence: TTG
caacagttcagctgagaaat

SEQ ID NO: 412283 - DNA, 20 bp, Artificial Sequence
  Description of Artificial Sequence: Synthetic oligonucleotide
  Target: LAMA2; (+) strand; PAM type: YTN; PAM sequence: TTC
agctgagaaatggattgccc

SEQ ID NO: 412284 - DNA, 20 bp, Artificial Sequence
  Description of Artificial Sequence: Synthetic oligonucleotide
  Target: LAMA2; (+) strand; PAM type: YTN; PAM sequence: CTG
agaaatggattgccctactt

SEQ ID NO: 412285 - DNA, 20 bp, Artificial Sequence
  Description of Artificial Sequence: Synthetic oligonucleotide
  Target: LAMA2; (+) strand; PAM type: YTN; PAM sequence: TTG
ccctacttcagctatgactt

SEQ ID NO: 412286 - DNA, 20 bp, Artificial Sequence
  Description of Artificial Sequence: Synthetic oligonucleotide
  Target: LAMA2; (+) strand; PAM type: YTN; PAM sequence: CTA
cttcagctatgacttgggga

SEQ ID NO: 412287 - DNA, 20 bp, Artificial Sequence
  Description of Artificial Sequence: Synthetic oligonucleotide
  Target: LAMA2; (+) strand; PAM type: YTN; PAM sequence: CTT
cagctatgacttggggagtg

SEQ ID NO: 412288 - DNA, 20 bp, Artificial Sequence
  Description of Artificial Sequence: Synthetic oligonucleotide
  Target: LAMA2; (+) strand; PAM type: YTN; PAM sequence: TTC
agctatgacttggggagtgg

SEQ ID NO: 412289 - DNA, 20 bp, Artificial Sequence
  Description of Artificial Sequence: Synthetic oligonucleotide
  Target: LAMA2; (+) strand; PAM type: YTN; PAM sequence: CTA
tgacttggggagtggggaca

SEQ ID NO: 412290 - DNA, 20 bp, Artificial Sequence
  Description of Artificial Sequence: Synthetic oligonucleotide
  Target: LAMA2; (+) strand; PAM type: YTN; PAM sequence: CTT
ggggagtggggacacccaca

SEQ ID NO: 412291 - DNA, 20 bp, Artificial Sequence
  Description of Artificial Sequence: Synthetic oligonucleotide
  Target: LAMA2; (+) strand; PAM type: YTN; PAM sequence: TTG
gggagtggggacacccacac

SEQ ID NO: 412292 - DNA, 20 bp, Artificial Sequence
  Description of Artificial Sequence: Synthetic oligonucleotide
  Target: LAMA2; (+) strand; PAM type: YTN; PAM sequence: CTG
gatattggcagtaccctaag

SEQ ID NO: 412293 - DNA, 20 bp, Artificial Sequence
  Description of Artificial Sequence: Synthetic oligonucleotide
  Target: LAMA2; (+) strand; PAM type: YTN; PAM sequence: TTG
gcagtaccctaagggaatta

SEQ ID NO: 412294 - DNA, 20 bp, Artificial Sequence
  Description of Artificial Sequence: Synthetic oligonucleotide
  Target: LAMA2; (+) strand; PAM type: YTN; PAM sequence: CTA
agggaattactgagtggcag

SEQ ID NO: 412295 - DNA, 20 bp, Artificial Sequence
  Description of Artificial Sequence: Synthetic oligonucleotide
  Target: LAMA2; (+) strand; PAM type: YTN; PAM sequence: TTA
ctgagtggcagccatcagca

SEQ ID NO: 412296 - DNA, 20 bp, Artificial Sequence
  Description of Artificial Sequence: Synthetic oligonucleotide
  Target: LAMA2; (+) strand; PAM type: YTN; PAM sequence: CTG
agtggcagccatcagcattc

SEQ ID NO: 412297 - DNA, 20 bp, Artificial Sequence
  Description of Artificial Sequence: Synthetic oligonucleotide
  Target: LAMA2; (+) strand; PAM type: YTN; PAM sequence: TTC
tcctggtgccagtatatttt

SEQ ID NO: 412298 - DNA, 20 bp, Artificial Sequence
  Description of Artificial Sequence: Synthetic oligonucleotide
  Target: LAMA2; (+) strand; PAM type: YTN; PAM sequence: CTC
ctggtgccagtatattttgc

SEQ ID NO: 412299 - DNA, 20 bp, Artificial Sequence
  Description of Artificial Sequence: Synthetic oligonucleotide
  Target: LAMA2; (+) strand; PAM type: YTN; PAM sequence: CTG
gtgccagtatattttgccag

SEQ ID NO: 412300 - DNA, 20 bp, Artificial Sequence
  Description of Artificial Sequence: Synthetic oligonucleotide
  Target: LAMA2; (+) strand; PAM type: YTN; PAM sequence: TTT
tgccagggcagacactgact

SEQ ID NO: 412301 - DNA, 20 bp, Artificial Sequence
  Description of Artificial Sequence: Synthetic oligonucleotide
  Target: LAMA2; (+) strand; PAM type: YTN; PAM sequence: TTT
gccagggcagacactgactc

SEQ ID NO: 412302 - DNA, 20 bp, Artificial Sequence
  Description of Artificial Sequence: Synthetic oligonucleotide
  Target: LAMA2; (+) strand; PAM type: YTN; PAM sequence: TTG
ccagggcagacactgactct

SEQ ID NO: 412303 - DNA, 20 bp, Artificial Sequence
  Description of Artificial Sequence: Synthetic oligonucleotide
  Target: LAMA2; (+) strand; PAM type: YTN; PAM sequence: CTG
actctggcagaagctaaaaa

SEQ ID NO: 412304 - DNA, 20 bp, Artificial Sequence
  Description of Artificial Sequence: Synthetic oligonucleotide
  Target: LAMA2; (+) strand; PAM type: YTN; PAM sequence: CTC
tggcagaagctaaaaataaa

SEQ ID NO: 412305 - DNA, 20 bp, Artificial Sequence
  Description of Artificial Sequence: Synthetic oligonucleotide
  Target: LAMA2; (+) strand; PAM type: YTN; PAM sequence: CTG
gcagaagctaaaaataaaat

SEQ ID NO: 412306 - DNA, 20 bp, Artificial Sequence
  Description of Artificial Sequence: Synthetic oligonucleotide
  Target: LAMA2; (+) strand; PAM type: YTN; PAM sequence: CTA
aaaataaaataagtgccata

SEQ ID NO: 412307 - DNA, 20 bp, Artificial Sequence
  Description of Artificial Sequence: Synthetic oligonucleotide
  Target: LAMA2; (+) strand; PAM type: YTN; PAM sequence: CTA
ccacaatcttggaaaatgtg

SEQ ID NO: 412308 - DNA, 20 bp, Artificial Sequence
  Description of Artificial Sequence: Synthetic oligonucleotide
  Target: LAMA2; (+) strand; PAM type: YTN; PAM sequence: CTT
ggaaaatgtgctcagacctg

SEQ ID NO: 412309 - DNA, 20 bp, Artificial Sequence
  Description of Artificial Sequence: Synthetic oligonucleotide
  Target: LAMA2; (+) strand; PAM type: YTN; PAM sequence: TTG
gaaaatgtgctcagacctgt

SEQ ID NO: 412310 - DNA, 20 bp, Artificial Sequence
  Description of Artificial Sequence: Synthetic oligonucleotide
  Target: LAMA2; (+) strand; PAM type: YTN; PAM sequence: CTC
agacctgtgtaggtttgcat

SEQ ID NO: 412311 - DNA, 20 bp, Artificial Sequence
  Description of Artificial Sequence: Synthetic oligonucleotide
  Target: LAMA2; (+) strand; PAM type: YTN; PAM sequence: CTG
tgtaggtttgcatttgacca

SEQ ID NO: 412312 - DNA, 20 bp, Artificial Sequence
  Description of Artificial Sequence: Synthetic oligonucleotide
  Target: LAMA2; (+) strand; PAM type: YTN; PAM sequence: TTT
gcatttgaccactggcatgc

SEQ ID NO: 412313 - DNA, 20 bp, Artificial Sequence
  Description of Artificial Sequence: Synthetic oligonucleotide
  Target: LAMA2; (+) strand; PAM type: YTN; PAM sequence: TTG
catttgaccactggcatgcc

SEQ ID NO: 412314 - DNA, 20 bp, Artificial Sequence
  Description of Artificial Sequence: Synthetic oligonucleotide
  Target: LAMA2; (+) strand; PAM type: YTN; PAM sequence: TTT
gaccactggcatgcctcatc

SEQ ID NO: 412315 - DNA, 20 bp, Artificial Sequence
  Description of Artificial Sequence: Synthetic oligonucleotide
  Target: LAMA2; (+) strand; PAM type: YTN; PAM sequence: TTG
accactggcatgcctcatca

SEQ ID NO: 412316 - DNA, 20 bp, Artificial Sequence
  Description of Artificial Sequence: Synthetic oligonucleotide
  Target: LAMA2; (+) strand; PAM type: YTN; PAM sequence: CTG
gcatgcctcatcatggttcc

SEQ ID NO: 412317 - DNA, 20 bp, Artificial Sequence
  Description of Artificial Sequence: Synthetic oligonucleotide
  Target: LAMA2; (+) strand; PAM type: YTN; PAM sequence: CTC
atcatggttccatcactgct

SEQ ID NO: 412318 - DNA, 20 bp, Artificial Sequence
  Description of Artificial Sequence: Synthetic oligonucleotide
  Target: LAMA2; (+) strand; PAM type: YTN; PAM sequence: TTC
catcactgctatatggctgt

SEQ ID NO: 412319 - DNA, 20 bp, Artificial Sequence
  Description of Artificial Sequence: Synthetic oligonucleotide
  Target: LAMA2; (+) strand; PAM type: YTN; PAM sequence: CTG
ctatatggctgtggttttca

SEQ ID NO: 412320 - DNA, 20 bp, Artificial Sequence
  Description of Artificial Sequence: Synthetic oligonucleotide
  Target: LAMA2; (+) strand; PAM type: YTN; PAM sequence: CTA
tatggctgtggttttcaaac

SEQ ID NO: 412321 - DNA, 20 bp, Artificial Sequence
  Description of Artificial Sequence: Synthetic oligonucleotide
  Target: LAMA2; (+) strand; PAM type: YTN; PAM sequence: CTG
tggttttcaaacatctaccc

SEQ ID NO: 412322 - DNA, 20 bp, Artificial Sequence
  Description of Artificial Sequence: Synthetic oligonucleotide
  Target: LAMA2; (+) strand; PAM type: YTN; PAM sequence: TTT
tcaaacatctacccataaac

SEQ ID NO: 412323 - DNA, 20 bp, Artificial Sequence
  Description of Artificial Sequence: Synthetic oligonucleotide
  Target: LAMA2; (+) strand; PAM type: YTN; PAM sequence: TTT
caaacatctacccataaact

SEQ ID NO: 412324 - DNA, 20 bp, Artificial Sequence
  Description of Artificial Sequence: Synthetic oligonucleotide
  Target: LAMA2; (+) strand; PAM type: YTN; PAM sequence: TTC
aaacatctacccataaactg

SEQ ID NO: 412325 - DNA, 20 bp, Artificial Sequence
  Description of Artificial Sequence: Synthetic oligonucleotide
  Target: LAMA2; (+) strand; PAM type: YTN; PAM sequence: CTA
cccataaactgaggccaggt

SEQ ID NO: 412326 - DNA, 20 bp, Artificial Sequence
  Description of Artificial Sequence: Synthetic oligonucleotide
  Target: LAMA2; (+) strand; PAM type: YTN; PAM sequence: CTG
aggccaggtggctgaagaca

SEQ ID NO: 412327 - DNA, 20 bp, Artificial Sequence
  Description of Artificial Sequence: Synthetic oligonucleotide
  Target: LAMA2; (+) strand; PAM type: YTN; PAM sequence: CTG
aagacatttccactgctcta

SEQ ID NO: 412328 - DNA, 20 bp, Artificial Sequence
  Description of Artificial Sequence: Synthetic oligonucleotide
  Target: LAMA2; (+) strand; PAM type: YTN; PAM sequence: TTT
ccactgctctaagtgagaaa

SEQ ID NO: 412329 - DNA, 20 bp, Artificial Sequence
  Description of Artificial Sequence: Synthetic oligonucleotide
  Target: LAMA2; (+) strand; PAM type: YTN; PAM sequence: TTC
cactgctctaagtgagaaac

SEQ ID NO: 412330 - DNA, 20 bp, Artificial Sequence
  Description of Artificial Sequence: Synthetic oligonucleotide
  Target: LAMA2; (+) strand; PAM type: YTN; PAM sequence: CTG
ctctaagtgagaaacgtaga

SEQ ID NO: 412331 - DNA, 20 bp, Artificial Sequence
  Description of Artificial Sequence: Synthetic oligonucleotide
  Target: LAMA2; (+) strand; PAM type: YTN; PAM sequence: CTC
taagtgagaaacgtagaaca

SEQ ID NO: 412332 - DNA, 20 bp, Artificial Sequence
  Description of Artificial Sequence: Synthetic oligonucleotide
  Target: LAMA2; (+) strand; PAM type: YTN; PAM sequence: CTA
agtgagaaacgtagaacaga

SEQ ID NO: 412333 - DNA, 20 bp, Artificial Sequence
  Description of Artificial Sequence: Synthetic oligonucleotide
  Target: LAMA2; (+) strand; PAM type: YTN; PAM sequence: TTC
accatcaagctcgatgtatt

SEQ ID NO: 412334 - DNA, 20 bp, Artificial Sequence
  Description of Artificial Sequence: Synthetic oligonucleotide
  Target: LAMA2; (+) strand; PAM type: YTN; PAM sequence: CTC
gatgtattcaattttaagga

SEQ ID NO: 412335 - DNA, 20 bp, Artificial Sequence
  Description of Artificial Sequence: Synthetic oligonucleotide
  Target: LAMA2; (+) strand; PAM type: YTN; PAM sequence: TTC
aattttaaggaataatattt

SEQ ID NO: 412336 - DNA, 20 bp, Artificial Sequence
  Description of Artificial Sequence: Synthetic oligonucleotide
  Target: LAMA2; (+) strand; PAM type: YTN; PAM sequence: TTT
taaggaataatatttattct

SEQ ID NO: 412337 - DNA, 20 bp, Artificial Sequence
  Description of Artificial Sequence: Synthetic oligonucleotide
  Target: LAMA2; (+) strand; PAM type: YTN; PAM sequence: TTT
aaggaataatatttattctg

SEQ ID NO: 412338 - DNA, 20 bp, Artificial Sequence
  Description of Artificial Sequence: Synthetic oligonucleotide
  Target: LAMA2; (+) strand; PAM type: YTN; PAM sequence: TTA
aggaataatatttattctga

SEQ ID NO: 412339 - DNA, 20 bp, Artificial Sequence
  Description of Artificial Sequence: Synthetic oligonucleotide
  Target: LAMA2; (+) strand; PAM type: YTN; PAM sequence: TTT
attctgagattatattatag

SEQ ID NO: 412340 - DNA, 20 bp, Artificial Sequence
  Description of Artificial Sequence: Synthetic oligonucleotide
  Target: LAMA2; (+) strand; PAM type: YTN; PAM sequence: TTA
ttctgagattatattatagc

SEQ ID NO: 412341 - DNA, 20 bp, Artificial Sequence
  Description of Artificial Sequence: Synthetic oligonucleotide
  Target: LAMA2; (+) strand; PAM type: YTN; PAM sequence: TTC
tgagattatattatagcatt

SEQ ID NO: 412342 - DNA, 20 bp, Artificial Sequence
  Description of Artificial Sequence: Synthetic oligonucleotide
  Target: LAMA2; (+) strand; PAM type: YTN; PAM sequence: CTG
agattatattatagcatttt

SEQ ID NO: 412343 - DNA, 20 bp, Artificial Sequence
  Description of Artificial Sequence: Synthetic oligonucleotide
  Target: LAMA2; (+) strand; PAM type: YTN; PAM sequence: TTA
tattatagcatttttatggt

SEQ ID NO: 412344 - DNA, 20 bp, Artificial Sequence
  Description of Artificial Sequence: Synthetic oligonucleotide
  Target: LAMA2; (+) strand; PAM type: YTN; PAM sequence: TTA
tagcatttttatggtggcta

SEQ ID NO: 412345 - DNA, 20 bp, Artificial Sequence
  Description of Artificial Sequence: Synthetic oligonucleotide
  Target: LAMA2; (+) strand; PAM type: YTN; PAM sequence: TTT
ttatggtggctaaaaggcct

SEQ ID NO: 412346 - DNA, 20 bp, Artificial Sequence
  Description of Artificial Sequence: Synthetic oligonucleotide
  Target: LAMA2; (+) strand; PAM type: YTN; PAM sequence: TTT
tatggtggctaaaaggcctt

SEQ ID NO: 412347 - DNA, 20 bp, Artificial Sequence
  Description of Artificial Sequence: Synthetic oligonucleotide
  Target: LAMA2; (+) strand; PAM type: YTN; PAM sequence: TTT
atggtggctaaaaggccttt

SEQ ID NO: 412348 - DNA, 20 bp, Artificial Sequence
  Description of Artificial Sequence: Synthetic oligonucleotide
  Target: LAMA2; (+) strand; PAM type: YTN; PAM sequence: TTA
tggtggctaaaaggcctttc

SEQ ID NO: 412349 - DNA, 20 bp, Artificial Sequence
  Description of Artificial Sequence: Synthetic oligonucleotide
  Target: LAMA2; (+) strand; PAM type: YTN; PAM sequence: CTA
aaaggcctttctattatgaa

SEQ ID NO: 412350 - DNA, 20 bp, Artificial Sequence
  Description of Artificial Sequence: Synthetic oligonucleotide
  Target: LAMA2; (+) strand; PAM type: YTN; PAM sequence: CTT
tctattatgaaatagtattt

SEQ ID NO: 412351 - DNA, 20 bp, Artificial Sequence
  Description of Artificial Sequence: Synthetic oligonucleotide
  Target: LAMA2; (+) strand; PAM type: YTN; PAM sequence: TTT
ctattatgaaatagtatttg

SEQ ID NO: 412352 - DNA, 20 bp, Artificial Sequence
  Description of Artificial Sequence: Synthetic oligonucleotide
  Target: LAMA2; (+) strand; PAM type: YTN; PAM sequence: TTC
tattatgaaatagtatttgc

SEQ ID NO: 412353 - DNA, 20 bp, Artificial Sequence
  Description of Artificial Sequence: Synthetic oligonucleotide
  Target: LAMA2; (+) strand; PAM type: YTN; PAM sequence: CTA
ttatgaaatagtatttgcca

SEQ ID NO: 412354 - DNA, 20 bp, Artificial Sequence
  Description of Artificial Sequence: Synthetic oligonucleotide
  Target: LAMA2; (+) strand; PAM type: YTN; PAM sequence: TTA
tgaaatagtatttgccaaaa

SEQ ID NO: 412355 - DNA, 20 bp, Artificial Sequence
  Description of Artificial Sequence: Synthetic oligonucleotide
  Target: LAMA2; (+) strand; PAM type: YTN; PAM sequence: TTT
gccaaaagcaaaagttggca

SEQ ID NO: 412356 - DNA, 20 bp, Artificial Sequence
  Description of Artificial Sequence: Synthetic oligonucleotide
  Target: LAMA2; (+) strand; PAM type: YTN; PAM sequence: TTG
ccaaaagcaaaagttggcaa

SEQ ID NO: 412357 - DNA, 20 bp, Artificial Sequence
  Description of Artificial Sequence: Synthetic oligonucleotide
  Target: LAMA2; (+) strand; PAM type: YTN; PAM sequence: TTG
gcaacactaaaatgggtccc

SEQ ID NO: 412358 - DNA, 20 bp, Artificial Sequence
  Description of Artificial Sequence: Synthetic oligonucleotide
  Target: LAMA2; (+) strand; PAM type: YTN; PAM sequence: CTA
aaatgggtcccaagactccc

SEQ ID NO: 412359 - DNA, 20 bp, Artificial Sequence
  Description of Artificial Sequence: Synthetic oligonucleotide
  Target: LAMA2; (+) strand; PAM type: YTN; PAM sequence: CTC
cccacctaaccacacagtgg

SEQ ID NO: 412360 - DNA, 20 bp, Artificial Sequence
  Description of Artificial Sequence: Synthetic oligonucleotide
  Target: LAMA2; (+) strand; PAM type: YTN; PAM sequence: CTA
accacacagtggtctgtgaa

SEQ ID NO: 412361 - DNA, 20 bp, Artificial Sequence
  Description of Artificial Sequence: Synthetic oligonucleotide
  Target: LAMA2; (+) strand; PAM type: YTN; PAM sequence: CTG
tgaaaaccaggaatccagga

SEQ ID NO: 412362 - DNA, 20 bp, Artificial Sequence
  Description of Artificial Sequence: Synthetic oligonucleotide
  Target: LAMA2; (+) strand; PAM type: YTN; PAM sequence: CTC
tggttgatcgtgtttaaagg

SEQ ID NO: 412363 - DNA, 20 bp, Artificial Sequence
  Description of Artificial Sequence: Synthetic oligonucleotide
  Target: LAMA2; (+) strand; PAM type: YTN; PAM sequence: CTG
gttgatcgtgtttaaagggc

SEQ ID NO: 412364 - DNA, 20 bp, Artificial Sequence
  Description of Artificial Sequence: Synthetic oligonucleotide
  Target: LAMA2; (+) strand; PAM type: YTN; PAM sequence: TTG
atcgtgtttaaagggctcta

SEQ ID NO: 412365 - DNA, 20 bp, Artificial Sequence
  Description of Artificial Sequence: Synthetic oligonucleotide
  Target: LAMA2; (+) strand; PAM type: YTN; PAM sequence: TTT
aaagggctctaaggtatcat

SEQ ID NO: 412366 - DNA, 20 bp, Artificial Sequence
  Description of Artificial Sequence: Synthetic oligonucleotide
  Target: LAMA2; (+) strand; PAM type: YTN; PAM sequence: TTA
aagggctctaaggtatcatt

SEQ ID NO: 412367 - DNA, 20 bp, Artificial Sequence
  Description of Artificial Sequence: Synthetic oligonucleotide
  Target: LAMA2; (+) strand; PAM type: YTN; PAM sequence: CTC
taaggtatcatttctactga

SEQ ID NO: 412368 - DNA, 20 bp, Artificial Sequence
  Description of Artificial Sequence: Synthetic oligonucleotide
  Target: LAMA2; (+) strand; PAM type: YTN; PAM sequence: CTA
aggtatcatttctactgaca

SEQ ID NO: 412369 - DNA, 20 bp, Artificial Sequence
  Description of Artificial Sequence: Synthetic oligonucleotide
  Target: LAMA2; (+) strand; PAM type: YTN; PAM sequence: TTT
ctactgacagttatttggaa

SEQ ID NO: 412370 - DNA, 20 bp, Artificial Sequence
  Description of Artificial Sequence: Synthetic oligonucleotide
  Target: LAMA2; (+) strand; PAM type: YTN; PAM sequence: TTC
tactgacagttatttggaac

SEQ ID NO: 412371 - DNA, 20 bp, Artificial Sequence
  Description of Artificial Sequence: Synthetic oligonucleotide
  Target: LAMA2; (+) strand; PAM type: YTN; PAM sequence: CTA
ctgacagttatttggaacaa

SEQ ID NO: 412372 - DNA, 20 bp, Artificial Sequence
  Description of Artificial Sequence: Synthetic oligonucleotide
  Target: LAMA2; (+) strand; PAM type: YTN; PAM sequence: CTG
acagttatttggaacaactt

SEQ ID NO: 412373 - DNA, 20 bp, Artificial Sequence
  Description of Artificial Sequence: Synthetic oligonucleotide
  Target: LAMA2; (+) strand; PAM type: YTN; PAM sequence: TTA
tttggaacaactttaaaaac

SEQ ID NO: 412374 - DNA, 20 bp, Artificial Sequence
  Description of Artificial Sequence: Synthetic oligonucleotide
  Target: LAMA2; (+) strand; PAM type: YTN; PAM sequence: TTT
ggaacaactttaaaaacgtt

SEQ ID NO: 412375 - DNA, 20 bp, Artificial Sequence
  Description of Artificial Sequence: Synthetic oligonucleotide
  Target: LAMA2; (+) strand; PAM type: YTN; PAM sequence: TTG
gaacaactttaaaaacgttg

SEQ ID NO: 412376 - DNA, 20 bp, Artificial Sequence
  Description of Artificial Sequence: Synthetic oligonucleotide
  Target: LAMA2; (+) strand; PAM type: YTN; PAM sequence: CTT
taaaaacgttggccttacac

SEQ ID NO: 412377 - DNA, 20 bp, Artificial Sequence
  Description of Artificial Sequence: Synthetic oligonucleotide
  Target: LAMA2; (+) strand; PAM type: YTN; PAM sequence: TTT
aaaaacgttggccttacacc

SEQ ID NO: 412378 - DNA, 20 bp, Artificial Sequence
  Description of Artificial Sequence: Synthetic oligonucleotide
  Target: LAMA2; (+) strand; PAM type: YTN; PAM sequence: TTA
aaaacgttggccttacaccc

SEQ ID NO: 412379 - DNA, 20 bp, Artificial Sequence
  Description of Artificial Sequence: Synthetic oligonucleotide
  Target: LAMA2; (+) strand; PAM type: YTN; PAM sequence: TTG
gccttacacccagaaactgg

SEQ ID NO: 412380 - DNA, 20 bp, Artificial Sequence
  Description of Artificial Sequence: Synthetic oligonucleotide
  Target: LAMA2; (+) strand; PAM type: YTN; PAM sequence: CTT
acacccagaaactggtacta

SEQ ID NO: 412381 - DNA, 20 bp, Artificial Sequence
  Description of Artificial Sequence: Synthetic oligonucleotide
  Target: LAMA2; (+) strand; PAM type: YTN; PAM sequence: TTA
cacccagaaactggtactat

SEQ ID NO: 412382 - DNA, 20 bp, Artificial Sequence
  Description of Artificial Sequence: Synthetic oligonucleotide
  Target: LAMA2; (+) strand; PAM type: YTN; PAM sequence: CTG
gtactattatgggcacagaa

SEQ ID NO: 412383 - DNA, 20 bp, Artificial Sequence
  Description of Artificial Sequence: Synthetic oligonucleotide
  Target: LAMA2; (+) strand; PAM type: YTN; PAM sequence: CTA
ttatgggcacagaaggctca

SEQ ID NO: 412384 - DNA, 20 bp, Artificial Sequence
  Description of Artificial Sequence: Synthetic oligonucleotide
  Target: LAMA2; (+) strand; PAM type: YTN; PAM sequence: TTA
tgggcacagaaggctcattt

SEQ ID NO: 412385 - DNA, 20 bp, Artificial Sequence
  Description of Artificial Sequence: Synthetic oligonucleotide
  Target: LAMA2; (+) strand; PAM type: YTN; PAM sequence: CTC
atttgccagcttactgtcct

SEQ ID NO: 412386 - DNA, 20 bp, Artificial Sequence
  Description of Artificial Sequence: Synthetic oligonucleotide
  Target: LAMA2; (+) strand; PAM type: YTN; PAM sequence: TTT
gccagcttactgtcctcttt

SEQ ID NO: 412387 - DNA, 20 bp, Artificial Sequence
  Description of Artificial Sequence: Synthetic oligonucleotide
  Target: LAMA2; (+) strand; PAM type: YTN; PAM sequence: TTG
ccagcttactgtcctctttg

SEQ ID NO: 412388 - DNA, 20 bp, Artificial Sequence
  Description of Artificial Sequence: Synthetic oligonucleotide
  Target: LAMA2; (+) strand; PAM type: YTN; PAM sequence: CTT
actgtcctctttggcatgac

SEQ ID NO: 412389 - DNA, 20 bp, Artificial Sequence
  Description of Artificial Sequence: Synthetic oligonucleotide
  Target: LAMA2; (+) strand; PAM type: YTN; PAM sequence: TTA
ctgtcctctttggcatgact

SEQ ID NO: 412390 - DNA, 20 bp, Artificial Sequence
  Description of Artificial Sequence: Synthetic oligonucleotide
  Target: LAMA2; (+) strand; PAM type: YTN; PAM sequence: CTG
tcctctttggcatgactgca

SEQ ID NO: 412391 - DNA, 20 bp, Artificial Sequence
  Description of Artificial Sequence: Synthetic oligonucleotide
  Target: LAMA2; (+) strand; PAM type: YTN; PAM sequence: CTC
tttggcatgactgcaaatag

SEQ ID NO: 412392 - DNA, 20 bp, Artificial Sequence
  Description of Artificial Sequence: Synthetic oligonucleotide
  Target: LAMA2; (+) strand; PAM type: YTN; PAM sequence: CTT
tggcatgactgcaaatagat

SEQ ID NO: 412393 - DNA, 20 bp, Artificial Sequence
  Description of Artificial Sequence: Synthetic oligonucleotide
  Target: LAMA2; (+) strand; PAM type: YTN; PAM sequence: TTT
ggcatgactgcaaatagata

SEQ ID NO: 412394 - DNA, 20 bp, Artificial Sequence
  Description of Artificial Sequence: Synthetic oligonucleotide
  Target: LAMA2; (+) strand; PAM type: YTN; PAM sequence: TTG
gcatgactgcaaatagataa

SEQ ID NO: 412395 - DNA, 20 bp, Artificial Sequence
  Description of Artificial Sequence: Synthetic oligonucleotide
  Target: LAMA2; (+) strand; PAM type: YTN; PAM sequence: CTG
caaatagataatatactgcc

SEQ ID NO: 412396 - DNA, 20 bp, Artificial Sequence
  Description of Artificial Sequence: Synthetic oligonucleotide
  Target: LAMA2; (+) strand; PAM type: YTN; PAM sequence: CTG
cctgattaaaacaaaatctc

SEQ ID NO: 412397 - DNA, 20 bp, Artificial Sequence
  Description of Artificial Sequence: Synthetic oligonucleotide
  Target: LAMA2; (+) strand; PAM type: YTN; PAM sequence: CTG
attaaaacaaaatctcaaca

SEQ ID NO: 412398 - DNA, 20 bp, Artificial Sequence
  Description of Artificial Sequence: Synthetic oligonucleotide
  Target: LAMA2; (+) strand; PAM type: YTN; PAM sequence: TTA
aaacaaaatctcaacatttg

SEQ ID NO: 412399 - DNA, 20 bp, Artificial Sequence
  Description of Artificial Sequence: Synthetic oligonucleotide
  Target: LAMA2; (+) strand; PAM type: YTN; PAM sequence: CTC
aacatttgtctctgcacctg

SEQ ID NO: 412400 - DNA, 20 bp, Artificial Sequence
  Description of Artificial Sequence: Synthetic oligonucleotide
  Target: LAMA2; (+) strand; PAM type: YTN; PAM sequence: TTT
gtctctgcacctgcgatagc

SEQ ID NO: 412401 - DNA, 20 bp, Artificial Sequence
  Description of Artificial Sequence: Synthetic oligonucleotide
  Target: LAMA2; (+) strand; PAM type: YTN; PAM sequence: TTG
tctctgcacctgcgatagcc

SEQ ID NO: 412402 - DNA, 20 bp, Artificial Sequence
  Description of Artificial Sequence: Synthetic oligonucleotide
  Target: LAMA2; (+) strand; PAM type: YTN; PAM sequence: CTC
tgcacctgcgatagcctatt

SEQ ID NO: 412403 - DNA, 20 bp, Artificial Sequence
  Description of Artificial Sequence: Synthetic oligonucleotide
  Target: LAMA2; (+) strand; PAM type: YTN; PAM sequence: CTG
cacctgcgatagcctattaa

SEQ ID NO: 412404 - DNA, 20 bp, Artificial Sequence
  Description of Artificial Sequence: Synthetic oligonucleotide
  Target: LAMA2; (+) strand; PAM type: YTN; PAM sequence: CTG
cgatagcctattaaagcaaa

SEQ ID NO: 412405 - DNA, 20 bp, Artificial Sequence
  Description of Artificial Sequence: Synthetic oligonucleotide
  Target: LAMA2; (+) strand; PAM type: YTN; PAM sequence: CTA
ttaaagcaaagcttccctag

SEQ ID NO: 412406 - DNA, 20 bp, Artificial Sequence
  Description of Artificial Sequence: Synthetic oligonucleotide
  Target: LAMA2; (+) strand; PAM type: YTN; PAM sequence: TTA
aagcaaagcttccctaggta

SEQ ID NO: 412407 - DNA, 20 bp, Artificial Sequence
  Description of Artificial Sequence: Synthetic oligonucleotide
  Target: LAMA2; (+) strand; PAM type: YTN; PAM sequence: CTT
ccctaggtagaccaataaaa

SEQ ID NO: 412408 - DNA, 20 bp, Artificial Sequence
  Description of Artificial Sequence: Synthetic oligonucleotide
  Target: LAMA2; (+) strand; PAM type: YTN; PAM sequence: TTC
cctaggtagaccaataaaat

SEQ ID NO: 412409 - DNA, 20 bp, Artificial Sequence
  Description of Artificial Sequence: Synthetic oligonucleotide
  Target: LAMA2; (+) strand; PAM type: YTN; PAM sequence: CTA
ggtagaccaataaaattttt

SEQ ID NO: 412410 - DNA, 20 bp, Artificial Sequence
  Description of Artificial Sequence: Synthetic oligonucleotide
  Target: LAMA2; (+) strand; PAM type: YTN; PAM sequence: TTT
ttaattttcagagtacgata

SEQ ID NO: 412411 - DNA, 20 bp, Artificial Sequence
  Description of Artificial Sequence: Synthetic oligonucleotide
  Target: LAMA2; (+) strand; PAM type: YTN; PAM sequence: TTT
taattttcagagtacgatat

SEQ ID NO: 412412 - DNA, 20 bp, Artificial Sequence
  Description of Artificial Sequence: Synthetic oligonucleotide
  Target: LAMA2; (+) strand; PAM type: YTN; PAM sequence: TTT
aattttcagagtacgatatt

SEQ ID NO: 412413 - DNA, 20 bp, Artificial Sequence
  Description of Artificial Sequence: Synthetic oligonucleotide
  Target: LAMA2; (+) strand; PAM type: YTN; PAM sequence: TTA
attttcagagtacgatatta

SEQ ID NO: 412414 - DNA, 20 bp, Artificial Sequence
  Description of Artificial Sequence: Synthetic oligonucleotide
  Target: LAMA2; (+) strand; PAM type: YTN; PAM sequence: TTT
tcagagtacgatattattag

SEQ ID NO: 412415 - DNA, 20 bp, Artificial Sequence
  Description of Artificial Sequence: Synthetic oligonucleotide
  Target: LAMA2; (+) strand; PAM type: YTN; PAM sequence: TTT
cagagtacgatattattaga

SEQ ID NO: 412416 - DNA, 20 bp, Artificial Sequence
  Description of Artificial Sequence: Synthetic oligonucleotide
  Target: LAMA2; (+) strand; PAM type: YTN; PAM sequence: TTC
agagtacgatattattagat

SEQ ID NO: 412417 - DNA, 20 bp, Artificial Sequence
  Description of Artificial Sequence: Synthetic oligonucleotide
  Target: LAMA2; (+) strand; PAM type: YTN; PAM sequence: TTA
ttagatgttagatttggtta

SEQ ID NO: 412418 - DNA, 20 bp, Artificial Sequence
  Description of Artificial Sequence: Synthetic oligonucleotide
  Target: LAMA2; (+) strand; PAM type: YTN; PAM sequence: TTA
gatgttagatttggttaatg

SEQ ID NO: 412419 - DNA, 20 bp, Artificial Sequence
  Description of Artificial Sequence: Synthetic oligonucleotide
  Target: LAMA2; (+) strand; PAM type: YTN; PAM sequence: TTA
gatttggttaatgttaacat

SEQ ID NO: 412420 - DNA, 20 bp, Artificial Sequence
  Description of Artificial Sequence: Synthetic oligonucleotide
  Target: LAMA2; (+) strand; PAM type: YTN; PAM sequence: TTT
ggttaatgttaacatacttt

SEQ ID NO: 412421 - DNA, 20 bp, Artificial Sequence
  Description of Artificial Sequence: Synthetic oligonucleotide
  Target: LAMA2; (+) strand; PAM type: YTN; PAM sequence: TTG
gttaatgttaacatactttg

SEQ ID NO: 412422 - DNA, 20 bp, Artificial Sequence
  Description of Artificial Sequence: Synthetic oligonucleotide
  Target: LAMA2; (+) strand; PAM type: YTN; PAM sequence: TTA
atgttaacatactttgactt

SEQ ID NO: 412423 - DNA, 20 bp, Artificial Sequence
  Description of Artificial Sequence: Synthetic oligonucleotide
  Target: LAMA2; (+) strand; PAM type: YTN; PAM sequence: TTA
acatactttgacttgtcata

SEQ ID NO: 412424 - DNA, 20 bp, Artificial Sequence
  Description of Artificial Sequence: Synthetic oligonucleotide
  Target: LAMA2; (+) strand; PAM type: YTN; PAM sequence: CTT
tgacttgtcatattctagaa

SEQ ID NO: 412425 - DNA, 20 bp, Artificial Sequence
  Description of Artificial Sequence: Synthetic oligonucleotide
  Target: LAMA2; (+) strand; PAM type: YTN; PAM sequence: TTT
gacttgtcatattctagaaa

SEQ ID NO: 412426 - DNA, 20 bp, Artificial Sequence
  Description of Artificial Sequence: Synthetic oligonucleotide
  Target: LAMA2; (+) strand; PAM type: YTN; PAM sequence: TTG
acttgtcatattctagaaag

SEQ ID NO: 412427 - DNA, 20 bp, Artificial Sequence
  Description of Artificial Sequence: Synthetic oligonucleotide
  Target: LAMA2; (+) strand; PAM type: YTN; PAM sequence: CTT
gtcatattctagaaagccaa

SEQ ID NO: 412428 - DNA, 20 bp, Artificial Sequence
  Description of Artificial Sequence: Synthetic oligonucleotide
  Target: LAMA2; (+) strand; PAM type: YTN; PAM sequence: TTG
tcatattctagaaagccaaa

SEQ ID NO: 412429 - DNA, 20 bp, Artificial Sequence
  Description of Artificial Sequence: Synthetic oligonucleotide
  Target: LAMA2; (+) strand; PAM type: YTN; PAM sequence: TTC
tagaaagccaaagaacctta

SEQ ID NO: 412430 - DNA, 20 bp, Artificial Sequence
  Description of Artificial Sequence: Synthetic oligonucleotide
  Target: LAMA2; (+) strand; PAM type: YTN; PAM sequence: CTA
gaaagccaaagaaccttaaa

SEQ ID NO: 412431 - DNA, 20 bp, Artificial Sequence
  Description of Artificial Sequence: Synthetic oligonucleotide
  Target: LAMA2; (+) strand; PAM type: YTN; PAM sequence: CTT
aaaaaacgcgaagccaacca

SEQ ID NO: 412432 - DNA, 20 bp, Artificial Sequence
  Description of Artificial Sequence: Synthetic oligonucleotide
  Target: LAMA2; (+) strand; PAM type: YTN; PAM sequence: TTA
aaaaacgcgaagccaaccaa

SEQ ID NO: 412433 - DNA, 20 bp, Artificial Sequence
  Description of Artificial Sequence: Synthetic oligonucleotide
  Target: LAMA2; (+) strand; PAM type: YTN; PAM sequence: TTT
gttatcatggaaataagaaa

SEQ ID NO: 412434 - DNA, 20 bp, Artificial Sequence
  Description of Artificial Sequence: Synthetic oligonucleotide
  Target: LAMA2; (+) strand; PAM type: YTN; PAM sequence: TTG
ttatcatggaaataagaaaa

SEQ ID NO: 412435 - DNA, 20 bp, Artificial Sequence
  Description of Artificial Sequence: Synthetic oligonucleotide
  Target: LAMA2; (+) strand; PAM type: YTN; PAM sequence: TTA
tcatggaaataagaaaagga

SEQ ID NO: 412436 - DNA, 20 bp, Artificial Sequence
  Description of Artificial Sequence: Synthetic oligonucleotide
  Target: LAMA2; (+) strand; PAM type: YTN; PAM sequence: CTT
catttttgctgggagcttat

SEQ ID NO: 412437 - DNA, 20 bp, Artificial Sequence
  Description of Artificial Sequence: Synthetic oligonucleotide
  Target: LAMA2; (+) strand; PAM type: YTN; PAM sequence: TTC
atttttgctgggagcttatg

SEQ ID NO: 412438 - DNA, 20 bp, Artificial Sequence
  Description of Artificial Sequence: Synthetic oligonucleotide
  Target: LAMA2; (+) strand; PAM type: YTN; PAM sequence: TTT
ttgctgggagcttatgacta

SEQ ID NO: 412439 - DNA, 20 bp, Artificial Sequence
  Description of Artificial Sequence: Synthetic oligonucleotide
  Target: LAMA2; (+) strand; PAM type: YTN; PAM sequence: TTT
tgctgggagcttatgactag

SEQ ID NO: 412440 - DNA, 20 bp, Artificial Sequence
  Description of Artificial Sequence: Synthetic oligonucleotide
  Target: LAMA2; (+) strand; PAM type: YTN; PAM sequence: TTT
gctgggagcttatgactagc

SEQ ID NO: 412441 - DNA, 20 bp, Artificial Sequence
  Description of Artificial Sequence: Synthetic oligonucleotide
  Target: LAMA2; (+) strand; PAM type: YTN; PAM sequence: TTG
ctgggagcttatgactagca

SEQ ID NO: 412442 - DNA, 20 bp, Artificial Sequence
  Description of Artificial Sequence: Synthetic oligonucleotide
  Target: LAMA2; (+) strand; PAM type: YTN; PAM sequence: CTG
ggagcttatgactagcaaat

SEQ ID NO: 412443 - DNA, 20 bp, Artificial Sequence
  Description of Artificial Sequence: Synthetic oligonucleotide
  Target: LAMA2; (+) strand; PAM type: YTN; PAM sequence: CTT
atgactagcaaatacagatc

SEQ ID NO: 412444 - DNA, 20 bp, Artificial Sequence
  Description of Artificial Sequence: Synthetic oligonucleotide
  Target: LAMA2; (+) strand; PAM type: YTN; PAM sequence: TTA
tgactagcaaatacagatcc

SEQ ID NO: 412445 - DNA, 20 bp, Artificial Sequence
  Description of Artificial Sequence: Synthetic oligonucleotide
  Target: LAMA2; (+) strand; PAM type: YTN; PAM sequence: CTA
gcaaatacagatccaaatga

SEQ ID NO: 412446 - DNA, 20 bp, Artificial Sequence
  Description of Artificial Sequence: Synthetic oligonucleotide
  Target: LAMA2; (+) strand; PAM type: YTN; PAM sequence: CTC
tcattaagagttcttccatc

SEQ ID NO: 412447 - DNA, 20 bp, Artificial Sequence
  Description of Artificial Sequence: Synthetic oligonucleotide
  Target: LAMA2; (+) strand; PAM type: YTN; PAM sequence: CTC
attaagagttcttccatctc

SEQ ID NO: 412448 - DNA, 20 bp, Artificial Sequence
  Description of Artificial Sequence: Synthetic oligonucleotide
  Target: LAMA2; (+) strand; PAM type: YTN; PAM sequence: TTA
agagttcttccatctctagc

SEQ ID NO: 412449 - DNA, 20 bp, Artificial Sequence
  Description of Artificial Sequence: Synthetic oligonucleotide
  Target: LAMA2; (+) strand; PAM type: YTN; PAM sequence: TTC
ttccatctctagctaataga

SEQ ID NO: 412450 - DNA, 20 bp, Artificial Sequence
  Description of Artificial Sequence: Synthetic oligonucleotide
  Target: LAMA2; (+) strand; PAM type: YTN; PAM sequence: CTT
ccatctctagctaatagaat

SEQ ID NO: 412451 - DNA, 20 bp, Artificial Sequence
  Description of Artificial Sequence: Synthetic oligonucleotide
  Target: LAMA2; (+) strand; PAM type: YTN; PAM sequence: TTC
catctctagctaatagaata

SEQ ID NO: 412452 - DNA, 20 bp, Artificial Sequence
  Description of Artificial Sequence: Synthetic oligonucleotide
  Target: LAMA2; (+) strand; PAM type: YTN; PAM sequence: CTC
tagctaatagaataataaat

SEQ ID NO: 412453 - DNA, 20 bp, Artificial Sequence
  Description of Artificial Sequence: Synthetic oligonucleotide
  Target: LAMA2; (+) strand; PAM type: YTN; PAM sequence: CTA
gctaatagaataataaatat

SEQ ID NO: 412454 - DNA, 20 bp, Artificial Sequence
  Description of Artificial Sequence: Synthetic oligonucleotide
  Target: LAMA2; (+) strand; PAM type: YTN; PAM sequence: CTA
atagaataataaatatgaca

SEQ ID NO: 412455 - DNA, 20 bp, Artificial Sequence
  Description of Artificial Sequence: Synthetic oligonucleotide
  Target: LAMA2; (+) strand; PAM type: YTN; PAM sequence: TTT
gagaaaaagacatattgttg

SEQ ID NO: 412456 - DNA, 20 bp, Artificial Sequence
  Description of Artificial Sequence: Synthetic oligonucleotide
  Target: LAMA2; (+) strand; PAM type: YTN; PAM sequence: TTG
agaaaaagacatattgttga

SEQ ID NO: 412457 - DNA, 20 bp, Artificial Sequence
  Description of Artificial Sequence: Synthetic oligonucleotide
  Target: LAMA2; (+) strand; PAM type: YTN; PAM sequence: TTG
ttgaaccacaatgaggctgg

SEQ ID NO: 412458 - DNA, 20 bp, Artificial Sequence
  Description of Artificial Sequence: Synthetic oligonucleotide
  Target: LAMA2; (+) strand; PAM type: YTN; PAM sequence: TTG
aaccacaatgaggctgggat

SEQ ID NO: 412459 - DNA, 20 bp, Artificial Sequence
  Description of Artificial Sequence: Synthetic oligonucleotide
  Target: LAMA2; (+) strand; PAM type: YTN; PAM sequence: CTG
ggattaagaaagggaactta

SEQ ID NO: 412460 - DNA, 20 bp, Artificial Sequence
  Description of Artificial Sequence: Synthetic oligonucleotide
  Target: LAMA2; (+) strand; PAM type: YTN; PAM sequence: TTA
agaaagggaacttaaatact

SEQ ID NO: 412461 - DNA, 20 bp, Artificial Sequence
  Description of Artificial Sequence: Synthetic oligonucleotide
  Target: LAMA2; (+) strand; PAM type: YTN; PAM sequence: CTT
aaatactataattagtcaaa

SEQ ID NO: 412462 - DNA, 20 bp, Artificial Sequence
  Description of Artificial Sequence: Synthetic oligonucleotide
  Target: LAMA2; (+) strand; PAM type: YTN; PAM sequence: TTA
aatactataattagtcaaat

SEQ ID NO: 412463 - DNA, 20 bp, Artificial Sequence
  Description of Artificial Sequence: Synthetic oligonucleotide
  Target: LAMA2; (+) strand; PAM type: YTN; PAM sequence: CTA
taattagtcaaattaataac

SEQ ID NO: 412464 - DNA, 20 bp, Artificial Sequence
  Description of Artificial Sequence: Synthetic oligonucleotide
  Target: LAMA2; (+) strand; PAM type: YTN; PAM sequence: TTA
gtcaaattaataacggattt

SEQ ID NO: 412465 - DNA, 20 bp, Artificial Sequence
  Description of Artificial Sequence: Synthetic oligonucleotide
  Target: LAMA2; (+) strand; PAM type: YTN; PAM sequence: TTA
ataacggattttatttttga

SEQ ID NO: 412466 - DNA, 20 bp, Artificial Sequence
  Description of Artificial Sequence: Synthetic oligonucleotide
  Target: LAMA2; (+) strand; PAM type: YTN; PAM sequence: TTT
tatttttgatggtttttaaa

SEQ ID NO: 412467 - DNA, 20 bp, Artificial Sequence
  Description of Artificial Sequence: Synthetic oligonucleotide
  Target: LAMA2; (+) strand; PAM type: YTN; PAM sequence: TTT
atttttgatggtttttaaaa

SEQ ID NO: 412468 - DNA, 20 bp, Artificial Sequence
  Description of Artificial Sequence: Synthetic oligonucleotide
  Target: LAMA2; (+) strand; PAM type: YTN; PAM sequence: TTA
tttttgatggtttttaaaaa

SEQ ID NO: 412469 - DNA, 20 bp, Artificial Sequence
  Description of Artificial Sequence: Synthetic oligonucleotide
  Target: LAMA2; (+) strand; PAM type: YTN; PAM sequence: TTT
ttgatggtttttaaaaatta

SEQ ID NO: 412470 - DNA, 20 bp, Artificial Sequence
  Description of Artificial Sequence: Synthetic oligonucleotide
  Target: LAMA2; (+) strand; PAM type: YTN; PAM sequence: TTT
tgatggtttttaaaaattac

SEQ ID NO: 412471 - DNA, 20 bp, Artificial Sequence
  Description of Artificial Sequence: Synthetic oligonucleotide
  Target: LAMA2; (+) strand; PAM type: YTN; PAM sequence: TTT
gatggtttttaaaaattact

SEQ ID NO: 412472 - DNA, 20 bp, Artificial Sequence
  Description of Artificial Sequence: Synthetic oligonucleotide
  Target: LAMA2; (+) strand; PAM type: YTN; PAM sequence: TTG
atggtttttaaaaattactt

SEQ ID NO: 412473 - DNA, 20 bp, Artificial Sequence
  Description of Artificial Sequence: Synthetic oligonucleotide
  Target: LAMA2; (+) strand; PAM type: YTN; PAM sequence: TTT
ttaaaaattacttcccaaac

SEQ ID NO: 412474 - DNA, 20 bp, Artificial Sequence
  Description of Artificial Sequence: Synthetic oligonucleotide
  Target: LAMA2; (+) strand; PAM type: YTN; PAM sequence: TTT
taaaaattacttcccaaacc

SEQ ID NO: 412475 - DNA, 20 bp, Artificial Sequence
  Description of Artificial Sequence: Synthetic oligonucleotide
  Target: LAMA2; (+) strand; PAM type: YTN; PAM sequence: TTT
aaaaattacttcccaaacca

SEQ ID NO: 412476 - DNA, 20 bp, Artificial Sequence
  Description of Artificial Sequence: Synthetic oligonucleotide
  Target: LAMA2; (+) strand; PAM type: YTN; PAM sequence: TTA
aaaattacttcccaaaccag

SEQ ID NO: 412477 - DNA, 20 bp, Artificial Sequence
  Description of Artificial Sequence: Synthetic oligonucleotide
  Target: LAMA2; (+) strand; PAM type: YTN; PAM sequence: TTA
cttcccaaaccagaatagat

SEQ ID NO: 412478 - DNA, 20 bp, Artificial Sequence
  Description of Artificial Sequence: Synthetic oligonucleotide
  Target: LAMA2; (+) strand; PAM type: YTN; PAM sequence: CTT
cccaaaccagaatagatatg

SEQ ID NO: 412479 - DNA, 20 bp, Artificial Sequence
  Description of Artificial Sequence: Synthetic oligonucleotide
  Target: LAMA2; (+) strand; PAM type: YTN; PAM sequence: TTC
ccaaaccagaatagatatgt

SEQ ID NO: 412480 - DNA, 20 bp, Artificial Sequence
  Description of Artificial Sequence: Synthetic oligonucleotide
  Target: LAMA2; (+) strand; PAM type: YTN; PAM sequence: TTA
ctctaatcctgacccagact

SEQ ID NO: 412481 - DNA, 20 bp, Artificial Sequence
  Description of Artificial Sequence: Synthetic oligonucleotide
  Target: LAMA2; (+) strand; PAM type: YTN; PAM sequence: CTC
taatcctgacccagactcat

SEQ ID NO: 412482 - DNA, 20 bp, Artificial Sequence
  Description of Artificial Sequence: Synthetic oligonucleotide
  Target: LAMA2; (+) strand; PAM type: YTN; PAM sequence: CTA
atcctgacccagactcattt

SEQ ID NO: 412483 - DNA, 20 bp, Artificial Sequence
  Description of Artificial Sequence: Synthetic oligonucleotide
  Target: LAMA2; (+) strand; PAM type: YTN; PAM sequence: CTG
acccagactcatttttaaac

SEQ ID NO: 412484 - DNA, 20 bp, Artificial Sequence
  Description of Artificial Sequence: Synthetic oligonucleotide
  Target: LAMA2; (+) strand; PAM type: YTN; PAM sequence: CTC
atttttaaaccatcatggta

SEQ ID NO: 412485 - DNA, 20 bp, Artificial Sequence
  Description of Artificial Sequence: Synthetic oligonucleotide
  Target: LAMA2; (+) strand; PAM type: YTN; PAM sequence: TTT
ttaaaccatcatggtacttt

SEQ ID NO: 412486 - DNA, 20 bp, Artificial Sequence
  Description of Artificial Sequence: Synthetic oligonucleotide
  Target: LAMA2; (+) strand; PAM type: YTN; PAM sequence: TTT
taaaccatcatggtacttta

SEQ ID NO: 412487 - DNA, 20 bp, Artificial Sequence
  Description of Artificial Sequence: Synthetic oligonucleotide
  Target: LAMA2; (+) strand; PAM type: YTN; PAM sequence: TTT
aaaccatcatggtactttag

SEQ ID NO: 412488 - DNA, 20 bp, Artificial Sequence
  Description of Artificial Sequence: Synthetic oligonucleotide
  Target: LAMA2; (+) strand; PAM type: YTN; PAM sequence: TTA
aaccatcatggtactttagc

SEQ ID NO: 412489 - DNA, 20 bp, Artificial Sequence
  Description of Artificial Sequence: Synthetic oligonucleotide
  Target: LAMA2; (+) strand; PAM type: YTN; PAM sequence: CTT
tagcatttcacaggctttca

SEQ ID NO: 412490 - DNA, 20 bp, Artificial Sequence
  Description of Artificial Sequence: Synthetic oligonucleotide
  Target: LAMA2; (+) strand; PAM type: YTN; PAM sequence: TTT
agcatttcacaggctttcat

SEQ ID NO: 412491 - DNA, 20 bp, Artificial Sequence
  Description of Artificial Sequence: Synthetic oligonucleotide
  Target: LAMA2; (+) strand; PAM type: YTN; PAM sequence: TTA
gcatttcacaggctttcatg

SEQ ID NO: 412492 - DNA, 20 bp, Artificial Sequence
  Description of Artificial Sequence: Synthetic oligonucleotide
  Target: LAMA2; (+) strand; PAM type: YTN; PAM sequence: TTT
cacaggctttcatgctcctt

SEQ ID NO: 412493 - DNA, 20 bp, Artificial Sequence
  Description of Artificial Sequence: Synthetic oligonucleotide
  Target: LAMA2; (+) strand; PAM type: YTN; PAM sequence: TTC
acaggctttcatgctccttt

SEQ ID NO: 412494 - DNA, 20 bp, Artificial Sequence
  Description of Artificial Sequence: Synthetic oligonucleotide
  Target: LAMA2; (+) strand; PAM type: YTN; PAM sequence: CTT
tcatgctcctttacctaaat

SEQ ID NO: 412495 - DNA, 20 bp, Artificial Sequence
  Description of Artificial Sequence: Synthetic oligonucleotide
  Target: LAMA2; (+) strand; PAM type: YTN; PAM sequence: TTT
catgctcctttacctaaatt

SEQ ID NO: 412496 - DNA, 20 bp, Artificial Sequence
  Description of Artificial Sequence: Synthetic oligonucleotide
  Target: LAMA2; (+) strand; PAM type: YTN; PAM sequence: TTC
atgctcctttacctaaattc

SEQ ID NO: 412497 - DNA, 20 bp, Artificial Sequence
  Description of Artificial Sequence: Synthetic oligonucleotide
  Target: LAMA2; (+) strand; PAM type: YTN; PAM sequence: CTC
ctttacctaaattcagactc

SEQ ID NO: 412498 - DNA, 20 bp, Artificial Sequence
  Description of Artificial Sequence: Synthetic oligonucleotide
  Target: LAMA2; (+) strand; PAM type: YTN; PAM sequence: CTT
tacctaaattcagactcaag

SEQ ID NO: 412499 - DNA, 20 bp, Artificial Sequence
  Description of Artificial Sequence: Synthetic oligonucleotide
  Target: LAMA2; (+) strand; PAM type: YTN; PAM sequence: TTT
acctaaattcagactcaagg

SEQ ID NO: 412500 - DNA, 20 bp, Artificial Sequence
  Description of Artificial Sequence: Synthetic oligonucleotide
  Target: LAMA2; (+) strand; PAM type: YTN; PAM sequence: TTA
cctaaattcagactcaaggt

SEQ ID NO: 412501 - DNA, 20 bp, Artificial Sequence
  Description of Artificial Sequence: Synthetic oligonucleotide
  Target: LAMA2; (+) strand; PAM type: YTN; PAM sequence: CTA
aattcagactcaaggttttt

SEQ ID NO: 412502 - DNA, 20 bp, Artificial Sequence
  Description of Artificial Sequence: Synthetic oligonucleotide
  Target: LAMA2; (+) strand; PAM type: YTN; PAM sequence: TTC
agactcaaggtttttatact

SEQ ID NO: 412503 - DNA, 20 bp, Artificial Sequence
  Description of Artificial Sequence: Synthetic oligonucleotide
  Target: LAMA2; (+) strand; PAM type: YTN; PAM sequence: CTC
aaggtttttatactccagcc

SEQ ID NO: 412504 - DNA, 20 bp, Artificial Sequence
  Description of Artificial Sequence: Synthetic oligonucleotide
  Target: LAMA2; (+) strand; PAM type: YTN; PAM sequence: TTT
ttatactccagccagtcttt

SEQ ID NO: 412505 - DNA, 20 bp, Artificial Sequence
  Description of Artificial Sequence: Synthetic oligonucleotide
  Target: LAMA2; (+) strand; PAM type: YTN; PAM sequence: TTT
tatactccagccagtcttta

SEQ ID NO: 412506 - DNA, 20 bp, Artificial Sequence
  Description of Artificial Sequence: Synthetic oligonucleotide
  Target: LAMA2; (+) strand; PAM type: YTN; PAM sequence: TTT
atactccagccagtctttac

SEQ ID NO: 412507 - DNA, 20 bp, Artificial Sequence
  Description of Artificial Sequence: Synthetic oligonucleotide
  Target: LAMA2; (+) strand; PAM type: YTN; PAM sequence: TTA
tactccagccagtctttaca

SEQ ID NO: 412508 - DNA, 20 bp, Artificial Sequence
  Description of Artificial Sequence: Synthetic oligonucleotide
  Target: LAMA2; (+) strand; PAM type: YTN; PAM sequence: CTC
cagccagtctttacacccct

SEQ ID NO: 412509 - DNA, 20 bp, Artificial Sequence
  Description of Artificial Sequence: Synthetic oligonucleotide
  Target: LAMA2; (+) strand; PAM type: YTN; PAM sequence: CTT
tacaccccttatttcattct

SEQ ID NO: 412510 - DNA, 20 bp, Artificial Sequence
  Description of Artificial Sequence: Synthetic oligonucleotide
  Target: LAMA2; (+) strand; PAM type: YTN; PAM sequence: TTT
acaccccttatttcattctg

SEQ ID NO: 412511 - DNA, 20 bp, Artificial Sequence
  Description of Artificial Sequence: Synthetic oligonucleotide
  Target: LAMA2; (+) strand; PAM type: YTN; PAM sequence: TTA
caccccttatttcattctgt

SEQ ID NO: 412512 - DNA, 20 bp, Artificial Sequence
  Description of Artificial Sequence: Synthetic oligonucleotide
  Target: LAMA2; (+) strand; PAM type: YTN; PAM sequence: CTT
atttcattctgtctcagaag

SEQ ID NO: 412513 - DNA, 20 bp, Artificial Sequence
  Description of Artificial Sequence: Synthetic oligonucleotide
  Target: LAMA2; (+) strand; PAM type: YTN; PAM sequence: TTA
tttcattctgtctcagaaga

SEQ ID NO: 412514 - DNA, 20 bp, Artificial Sequence
  Description of Artificial Sequence: Synthetic oligonucleotide
  Target: LAMA2; (+) strand; PAM type: YTN; PAM sequence: TTT
cattctgtctcagaagataa

SEQ ID NO: 412515 - DNA, 20 bp, Artificial Sequence
  Description of Artificial Sequence: Synthetic oligonucleotide
  Target: LAMA2; (+) strand; PAM type: YTN; PAM sequence: TTC
attctgtctcagaagataat

SEQ ID NO: 412516 - DNA, 20 bp, Artificial Sequence
  Description of Artificial Sequence: Synthetic oligonucleotide
  Target: LAMA2; (+) strand; PAM type: YTN; PAM sequence: TTC
tgtctcagaagataattcac

SEQ ID NO: 412517 - DNA, 20 bp, Artificial Sequence
  Description of Artificial Sequence: Synthetic oligonucleotide
  Target: LAMA2; (+) strand; PAM type: YTN; PAM sequence: CTG
tctcagaagataattcactc

SEQ ID NO: 412518 - DNA, 20 bp, Artificial Sequence
  Description of Artificial Sequence: Synthetic oligonucleotide
  Target: LAMA2; (+) strand; PAM type: YTN; PAM sequence: CTC
agaagataattcactccacc

SEQ ID NO: 412519 - DNA, 20 bp, Artificial Sequence
  Description of Artificial Sequence: Synthetic oligonucleotide
  Target: LAMA2; (+) strand; PAM type: YTN; PAM sequence: TTC
actccaccgccctaaatttc

SEQ ID NO: 412520 - DNA, 20 bp, Artificial Sequence
  Description of Artificial Sequence: Synthetic oligonucleotide
  Target: LAMA2; (+) strand; PAM type: YTN; PAM sequence: CTC
caccgccctaaatttcagcc

SEQ ID NO: 412521 - DNA, 20 bp, Artificial Sequence
  Description of Artificial Sequence: Synthetic oligonucleotide
  Target: LAMA2; (+) strand; PAM type: YTN; PAM sequence: CTA
aatttcagcctcagtcactt

SEQ ID NO: 412522 - DNA, 20 bp, Artificial Sequence
  Description of Artificial Sequence: Synthetic oligonucleotide
  Target: LAMA2; (+) strand; PAM type: YTN; PAM sequence: TTT
cagcctcagtcacttctcta

SEQ ID NO: 412523 - DNA, 20 bp, Artificial Sequence
  Description of Artificial Sequence: Synthetic oligonucleotide
  Target: LAMA2; (+) strand; PAM type: YTN; PAM sequence: TTC
agcctcagtcacttctctat

SEQ ID NO: 412524 - DNA, 20 bp, Artificial Sequence
  Description of Artificial Sequence: Synthetic oligonucleotide
  Target: LAMA2; (+) strand; PAM type: YTN; PAM sequence: CTC
agtcacttctctatcttact

SEQ ID NO: 412525 - DNA, 20 bp, Artificial Sequence
  Description of Artificial Sequence: Synthetic oligonucleotide
  Target: LAMA2; (+) strand; PAM type: YTN; PAM sequence: CTT
ctctatcttactcccccact

SEQ ID NO: 412526 - DNA, 20 bp, Artificial Sequence
  Description of Artificial Sequence: Synthetic oligonucleotide
  Target: LAMA2; (+) strand; PAM type: YTN; PAM sequence: TTC
tctatcttactcccccactt

SEQ ID NO: 412527 - DNA, 20 bp, Artificial Sequence
  Description of Artificial Sequence: Synthetic oligonucleotide
  Target: LAMA2; (+) strand; PAM type: YTN; PAM sequence: CTC
tatcttactcccccactttg

SEQ ID NO: 412528 - DNA, 20 bp, Artificial Sequence
  Description of Artificial Sequence: Synthetic oligonucleotide
  Target: LAMA2; (+) strand; PAM type: YTN; PAM sequence: CTA
tcttactcccccactttgta

SEQ ID NO: 412529 - DNA, 20 bp, Artificial Sequence
  Description of Artificial Sequence: Synthetic oligonucleotide
  Target: LAMA2; (+) strand; PAM type: YTN; PAM sequence: CTT
actcccccactttgtactca

SEQ ID NO: 412530 - DNA, 20 bp, Artificial Sequence
  Description of Artificial Sequence: Synthetic oligonucleotide
  Target: LAMA2; (+) strand; PAM type: YTN; PAM sequence: TTA
ctcccccactttgtactcat

SEQ ID NO: 412531 - DNA, 20 bp, Artificial Sequence
  Description of Artificial Sequence: Synthetic oligonucleotide
  Target: LAMA2; (+) strand; PAM type: YTN; PAM sequence: CTC
ccccactttgtactcatcag

SEQ ID NO: 412532 - DNA, 20 bp, Artificial Sequence
  Description of Artificial Sequence: Synthetic oligonucleotide
  Target: LAMA2; (+) strand; PAM type: YTN; PAM sequence: CTT
tgtactcatcaggttctgca

SEQ ID NO: 412533 - DNA, 20 bp, Artificial Sequence
  Description of Artificial Sequence: Synthetic oligonucleotide
  Target: LAMA2; (+) strand; PAM type: YTN; PAM sequence: TTT
gtactcatcaggttctgcag

SEQ ID NO: 412534 - DNA, 20 bp, Artificial Sequence
  Description of Artificial Sequence: Synthetic oligonucleotide
  Target: LAMA2; (+) strand; PAM type: YTN; PAM sequence: TTG
tactcatcaggttctgcaga

SEQ ID NO: 412535 - DNA, 20 bp, Artificial Sequence
  Description of Artificial Sequence: Synthetic oligonucleotide
  Target: LAMA2; (+) strand; PAM type: YTN; PAM sequence: CTC
atcaggttctgcagaaagta

SEQ ID NO: 412536 - DNA, 20 bp, Artificial Sequence
  Description of Artificial Sequence: Synthetic oligonucleotide
  Target: LAMA2; (+) strand; PAM type: YTN; PAM sequence: TTC
tgcagaaagtagtgcagctt

SEQ ID NO: 412537 - DNA, 20 bp, Artificial Sequence
  Description of Artificial Sequence: Synthetic oligonucleotide
  Target: LAMA2; (+) strand; PAM type: YTN; PAM sequence: CTG
cagaaagtagtgcagcttat

SEQ ID NO: 412538 - DNA, 20 bp, Artificial Sequence
  Description of Artificial Sequence: Synthetic oligonucleotide
  Target: LAMA2; (+) strand; PAM type: YTN; PAM sequence: CTT
atttgtgccactctttcttt

SEQ ID NO: 412539 - DNA, 20 bp, Artificial Sequence
  Description of Artificial Sequence: Synthetic oligonucleotide
  Target: LAMA2; (+) strand; PAM type: YTN; PAM sequence: TTA
tttgtgccactctttcttta

SEQ ID NO: 412540 - DNA, 20 bp, Artificial Sequence
  Description of Artificial Sequence: Synthetic oligonucleotide
  Target: LAMA2; (+) strand; PAM type: YTN; PAM sequence: TTT
gtgccactctttctttaatt

SEQ ID NO: 412541 - DNA, 20 bp, Artificial Sequence
  Description of Artificial Sequence: Synthetic oligonucleotide
  Target: LAMA2; (+) strand; PAM type: YTN; PAM sequence: TTG
tgccactctttctttaattc

SEQ ID NO: 412542 - DNA, 20 bp, Artificial Sequence
  Description of Artificial Sequence: Synthetic oligonucleotide
  Target: LAMA2; (+) strand; PAM type: YTN; PAM sequence: CTC
tttctttaattctgcacaag

SEQ ID NO: 412543 - DNA, 20 bp, Artificial Sequence
  Description of Artificial Sequence: Synthetic oligonucleotide
  Target: LAMA2; (+) strand; PAM type: YTN; PAM sequence: CTT
tctttaattctgcacaagaa

SEQ ID NO: 412544 - DNA, 20 bp, Artificial Sequence
  Description of Artificial Sequence: Synthetic oligonucleotide
  Target: LAMA2; (+) strand; PAM type: YTN; PAM sequence: TTT
ctttaattctgcacaagaag

SEQ ID NO: 412545 - DNA, 20 bp, Artificial Sequence
  Description of Artificial Sequence: Synthetic oligonucleotide
  Target: LAMA2; (+) strand; PAM type: YTN; PAM sequence: TTC
tttaattctgcacaagaagg

SEQ ID NO: 412546 - DNA, 20 bp, Artificial Sequence
  Description of Artificial Sequence: Synthetic oligonucleotide
  Target: LAMA2; (+) strand; PAM type: YTN; PAM sequence: CTT
taattctgcacaagaagggc

SEQ ID NO: 412547 - DNA, 20 bp, Artificial Sequence
  Description of Artificial Sequence: Synthetic oligonucleotide
  Target: LAMA2; (+) strand; PAM type: YTN; PAM sequence: TTT
aattctgcacaagaagggcc

SEQ ID NO: 412548 - DNA, 20 bp, Artificial Sequence
  Description of Artificial Sequence: Synthetic oligonucleotide
  Target: LAMA2; (+) strand; PAM type: YTN; PAM sequence: TTA
attctgcacaagaagggcct

SEQ ID NO: 412549 - DNA, 20 bp, Artificial Sequence
  Description of Artificial Sequence: Synthetic oligonucleotide
  Target: LAMA2; (+) strand; PAM type: YTN; PAM sequence: TTC
tgcacaagaagggcctgtta

SEQ ID NO: 412550 - DNA, 20 bp, Artificial Sequence
  Description of Artificial Sequence: Synthetic oligonucleotide
  Target: LAMA2; (+) strand; PAM type: YTN; PAM sequence: CTG
cacaagaagggcctgttagg

SEQ ID NO: 412551 - DNA, 20 bp, Artificial Sequence
  Description of Artificial Sequence: Synthetic oligonucleotide
  Target: LAMA2; (+) strand; PAM type: YTN; PAM sequence: CTG
ttaggcaaagggatgtagcg

SEQ ID NO: 412552 - DNA, 20 bp, Artificial Sequence
  Description of Artificial Sequence: Synthetic oligonucleotide
  Target: LAMA2; (+) strand; PAM type: YTN; PAM sequence: TTA
ggcaaagggatgtagcgtat

SEQ ID NO: 412553 - DNA, 20 bp, Artificial Sequence
  Description of Artificial Sequence: Synthetic oligonucleotide
  Target: LAMA2; (+) strand; PAM type: YTN; PAM sequence: CTG
aaattgtgttgggagcccag

SEQ ID NO: 412554 - DNA, 20 bp, Artificial Sequence
  Description of Artificial Sequence: Synthetic oligonucleotide
  Target: LAMA2; (+) strand; PAM type: YTN; PAM sequence: TTG
tgttgggagcccaggctctt

SEQ ID NO: 412555 - DNA, 20 bp, Artificial Sequence
  Description of Artificial Sequence: Synthetic oligonucleotide
  Target: LAMA2; (+) strand; PAM type: YTN; PAM sequence: TTG
ggagcccaggctctttgctc

SEQ ID NO: 412556 - DNA, 20 bp, Artificial Sequence
  Description of Artificial Sequence: Synthetic oligonucleotide
  Target: LAMA2; (+) strand; PAM type: YTN; PAM sequence: CTC
tttgctcaatcaaactaatg

SEQ ID NO: 412557 - DNA, 20 bp, Artificial Sequence
  Description of Artificial Sequence: Synthetic oligonucleotide
  Target: LAMA2; (+) strand; PAM type: YTN; PAM sequence: CTT
tgctcaatcaaactaatgca

SEQ ID NO: 412558 - DNA, 20 bp, Artificial Sequence
  Description of Artificial Sequence: Synthetic oligonucleotide
  Target: LAMA2; (+) strand; PAM type: YTN; PAM sequence: TTT
gctcaatcaaactaatgcac

SEQ ID NO: 412559 - DNA, 20 bp, Artificial Sequence
  Description of Artificial Sequence: Synthetic oligonucleotide
  Target: LAMA2; (+) strand; PAM type: YTN; PAM sequence: TTG
ctcaatcaaactaatgcact

SEQ ID NO: 412560 - DNA, 20 bp, Artificial Sequence
  Description of Artificial Sequence: Synthetic oligonucleotide
  Target: LAMA2; (+) strand; PAM type: YTN; PAM sequence: CTC
aatcaaactaatgcactttt

SEQ ID NO: 412561 - DNA, 20 bp, Artificial Sequence
  Description of Artificial Sequence: Synthetic oligonucleotide
  Target: LAMA2; (+) strand; PAM type: YTN; PAM sequence: CTA
atgcacttttaaaactgtgc

SEQ ID NO: 412562 - DNA, 20 bp, Artificial Sequence
  Description of Artificial Sequence: Synthetic oligonucleotide
  Target: LAMA2; (+) strand; PAM type: YTN; PAM sequence: CTT
ttaaaactgtgcatgaattt

SEQ ID NO: 412563 - DNA, 20 bp, Artificial Sequence
  Description of Artificial Sequence: Synthetic oligonucleotide
  Target: LAMA2; (+) strand; PAM type: YTN; PAM sequence: TTT
taaaactgtgcatgaatttt

SEQ ID NO: 412564 - DNA, 20 bp, Artificial Sequence
  Description of Artificial Sequence: Synthetic oligonucleotide
  Target: LAMA2; (+) strand; PAM type: YTN; PAM sequence: TTT
aaaactgtgcatgaattttg

SEQ ID NO: 412565 - DNA, 20 bp, Artificial Sequence
  Description of Artificial Sequence: Synthetic oligonucleotide
  Target: LAMA2; (+) strand; PAM type: YTN; PAM sequence: TTA
aaactgtgcatgaattttgc

SEQ ID NO: 412566 - DNA, 20 bp, Artificial Sequence
  Description of Artificial Sequence: Synthetic oligonucleotide
  Target: LAMA2; (+) strand; PAM type: YTN; PAM sequence: CTG
tgcatgaattttgctaccca

SEQ ID NO: 412567 - DNA, 20 bp, Artificial Sequence
  Description of Artificial Sequence: Synthetic oligonucleotide
  Target: LAMA2; (+) strand; PAM type: YTN; PAM sequence: TTT
tgctacccacttaatttatg

SEQ ID NO: 412568 - DNA, 20 bp, Artificial Sequence
  Description of Artificial Sequence: Synthetic oligonucleotide
  Target: LAMA2; (+) strand; PAM type: YTN; PAM sequence: TTT
gctacccacttaatttatga

SEQ ID NO: 412569 - DNA, 20 bp, Artificial Sequence
  Description of Artificial Sequence: Synthetic oligonucleotide
  Target: LAMA2; (+) strand; PAM type: YTN; PAM sequence: TTG
ctacccacttaatttatgaa

SEQ ID NO: 412570 - DNA, 20 bp, Artificial Sequence
  Description of Artificial Sequence: Synthetic oligonucleotide
  Target: LAMA2; (+) strand; PAM type: YTN; PAM sequence: CTA
cccacttaatttatgaaagt

SEQ ID NO: 412571 - DNA, 20 bp, Artificial Sequence
  Description of Artificial Sequence: Synthetic oligonucleotide
  Target: LAMA2; (+) strand; PAM type: YTN; PAM sequence: CTT
aatttatgaaagtgctatta

SEQ ID NO: 412572 - DNA, 20 bp, Artificial Sequence
  Description of Artificial Sequence: Synthetic oligonucleotide
  Target: LAMA2; (+) strand; PAM type: YTN; PAM sequence: TTA
atttatgaaagtgctattag

SEQ ID NO: 412573 - DNA, 20 bp, Artificial Sequence
  Description of Artificial Sequence: Synthetic oligonucleotide
  Target: LAMA2; (+) strand; PAM type: YTN; PAM sequence: TTT
atgaaagtgctattagtctg

SEQ ID NO: 412574 - DNA, 20 bp, Artificial Sequence
  Description of Artificial Sequence: Synthetic oligonucleotide
  Target: LAMA2; (+) strand; PAM type: YTN; PAM sequence: TTA
tgaaagtgctattagtctgc

SEQ ID NO: 412575 - DNA, 20 bp, Artificial Sequence
  Description of Artificial Sequence: Synthetic oligonucleotide
  Target: LAMA2; (+) strand; PAM type: YTN; PAM sequence: CTA
ttagtctgcagggttcctta

SEQ ID NO: 412576 - DNA, 20 bp, Artificial Sequence
  Description of Artificial Sequence: Synthetic oligonucleotide
  Target: LAMA2; (+) strand; PAM type: YTN; PAM sequence: TTA
gtctgcagggttccttacaa

SEQ ID NO: 412577 - DNA, 20 bp, Artificial Sequence
  Description of Artificial Sequence: Synthetic oligonucleotide
  Target: LAMA2; (+) strand; PAM type: YTN; PAM sequence: CTG
cagggttccttacaacattc

SEQ ID NO: 412578 - DNA, 20 bp, Artificial Sequence
  Description of Artificial Sequence: Synthetic oligonucleotide
  Target: LAMA2; (+) strand; PAM type: YTN; PAM sequence: TTC
cttacaacattcctccctct

SEQ ID NO: 412579 - DNA, 20 bp, Artificial Sequence
  Description of Artificial Sequence: Synthetic oligonucleotide
  Target: LAMA2; (+) strand; PAM type: YTN; PAM sequence: CTT
acaacattcctccctctcca

SEQ ID NO: 412580 - DNA, 20 bp, Artificial Sequence
  Description of Artificial Sequence: Synthetic oligonucleotide
  Target: LAMA2; (+) strand; PAM type: YTN; PAM sequence: TTA
caacattcctccctctccac

SEQ ID NO: 412581 - DNA, 20 bp, Artificial Sequence
  Description of Artificial Sequence: Synthetic oligonucleotide
  Target: LAMA2; (+) strand; PAM type: YTN; PAM sequence: TTC
ctccctctccacacatatcc

SEQ ID NO: 412582 - DNA, 20 bp, Artificial Sequence
  Description of Artificial Sequence: Synthetic oligonucleotide
  Target: LAMA2; (+) strand; PAM type: YTN; PAM sequence: CTC
cctctccacacatatccaca

SEQ ID NO: 412583 - DNA, 20 bp, Artificial Sequence
  Description of Artificial Sequence: Synthetic oligonucleotide
  Target: LAMA2; (+) strand; PAM type: YTN; PAM sequence: CTC
tccacacatatccacatttg

SEQ ID NO: 412584 - DNA, 20 bp, Artificial Sequence
  Description of Artificial Sequence: Synthetic oligonucleotide
  Target: LAMA2; (+) strand; PAM type: YTN; PAM sequence: CTC
cacacatatccacatttggc

SEQ ID NO: 412585 - DNA, 20 bp, Artificial Sequence
  Description of Artificial Sequence: Synthetic oligonucleotide
  Target: LAMA2; (+) strand; PAM type: YTN; PAM sequence: TTT
ggcaatctaccgaggagact

SEQ ID NO: 412586 - DNA, 20 bp, Artificial Sequence
  Description of Artificial Sequence: Synthetic oligonucleotide
  Target: LAMA2; (+) strand; PAM type: YTN; PAM sequence: TTG
gcaatctaccgaggagactt

SEQ ID NO: 412587 - DNA, 20 bp, Artificial Sequence
  Description of Artificial Sequence: Synthetic oligonucleotide
  Target: LAMA2; (+) strand; PAM type: YTN; PAM sequence: CTA
ccgaggagacttcgacctaa

SEQ ID NO: 412588 - DNA, 20 bp, Artificial Sequence
  Description of Artificial Sequence: Synthetic oligonucleotide
  Target: LAMA2; (+) strand; PAM type: YTN; PAM sequence: CTT
cgacctaaaactgacccagg

SEQ ID NO: 412589 - DNA, 20 bp, Artificial Sequence
  Description of Artificial Sequence: Synthetic oligonucleotide
  Target: LAMA2; (+) strand; PAM type: YTN; PAM sequence: TTC
gacctaaaactgacccagga

SEQ ID NO: 412590 - DNA, 20 bp, Artificial Sequence
  Description of Artificial Sequence: Synthetic oligonucleotide
  Target: LAMA2; (+) strand; PAM type: YTN; PAM sequence: CTA
aaactgacccaggaaaattt

SEQ ID NO: 412591 - DNA, 20 bp, Artificial Sequence
  Description of Artificial Sequence: Synthetic oligonucleotide
  Target: LAMA2; (+) strand; PAM type: YTN; PAM sequence: CTG
acccaggaaaatttggtatt

SEQ ID NO: 412592 - DNA, 20 bp, Artificial Sequence
  Description of Artificial Sequence: Synthetic oligonucleotide
  Target: LAMA2; (+) strand; PAM type: YTN; PAM sequence: TTT
ggtattcttttggtgatagt

SEQ ID NO: 412593 - DNA, 20 bp, Artificial Sequence
  Description of Artificial Sequence: Synthetic oligonucleotide
  Target: LAMA2; (+) strand; PAM type: YTN; PAM sequence: TTG
gtattcttttggtgatagta

SEQ ID NO: 412594 - DNA, 20 bp, Artificial Sequence
  Description of Artificial Sequence: Synthetic oligonucleotide
  Target: LAMA2; (+) strand; PAM type: YTN; PAM sequence: TTC
ttttggtgatagtagtcatg

SEQ ID NO: 412595 - DNA, 20 bp, Artificial Sequence
  Description of Artificial Sequence: Synthetic oligonucleotide
  Target: LAMA2; (+) strand; PAM type: YTN; PAM sequence: CTT
ttggtgatagtagtcatgga

SEQ ID NO: 412596 - DNA, 20 bp, Artificial Sequence
  Description of Artificial Sequence: Synthetic oligonucleotide
  Target: LAMA2; (+) strand; PAM type: YTN; PAM sequence: TTT
tggtgatagtagtcatggaa

SEQ ID NO: 412597 - DNA, 20 bp, Artificial Sequence
  Description of Artificial Sequence: Synthetic oligonucleotide
  Target: LAMA2; (+) strand; PAM type: YTN; PAM sequence: TTT
ggtgatagtagtcatggaaa

SEQ ID NO: 412598 - DNA, 20 bp, Artificial Sequence
  Description of Artificial Sequence: Synthetic oligonucleotide
  Target: LAMA2; (+) strand; PAM type: YTN; PAM sequence: TTG
gtgatagtagtcatggaaaa

SEQ ID NO: 412599 - DNA, 20 bp, Artificial Sequence
  Description of Artificial Sequence: Synthetic oligonucleotide
  Target: LAMA2; (+) strand; PAM type: YTN; PAM sequence: TTT
gagatattctgtaaaatggg

SEQ ID NO: 412600 - DNA, 20 bp, Artificial Sequence
  Description of Artificial Sequence: Synthetic oligonucleotide
  Target: LAMA2; (+) strand; PAM type: YTN; PAM sequence: TTG
agatattctgtaaaatgggt

SEQ ID NO: 412601 - DNA, 20 bp, Artificial Sequence
  Description of Artificial Sequence: Synthetic oligonucleotide
  Target: LAMA2; (+) strand; PAM type: YTN; PAM sequence: TTC
tgtaaaatgggtttaacttt

SEQ ID NO: 412602 - DNA, 20 bp, Artificial Sequence
  Description of Artificial Sequence: Synthetic oligonucleotide
  Target: LAMA2; (+) strand; PAM type: YTN; PAM sequence: CTG
taaaatgggtttaactttcc

SEQ ID NO: 412603 - DNA, 20 bp, Artificial Sequence
  Description of Artificial Sequence: Synthetic oligonucleotide
  Target: LAMA2; (+) strand; PAM type: YTN; PAM sequence: TTT
aactttcccatatataatgg

SEQ ID NO: 412604 - DNA, 20 bp, Artificial Sequence
  Description of Artificial Sequence: Synthetic oligonucleotide
  Target: LAMA2; (+) strand; PAM type: YTN; PAM sequence: TTA
actttcccatatataatggg

SEQ ID NO: 412605 - DNA, 20 bp, Artificial Sequence
  Description of Artificial Sequence: Synthetic oligonucleotide
  Target: LAMA2; (+) strand; PAM type: YTN; PAM sequence: CTT
tcccatatataatgggctta

SEQ ID NO: 412606 - DNA, 20 bp, Artificial Sequence
  Description of Artificial Sequence: Synthetic oligonucleotide
  Target: LAMA2; (+) strand; PAM type: YTN; PAM sequence: TTT
cccatatataatgggcttag

SEQ ID NO: 412607 - DNA, 20 bp, Artificial Sequence
  Description of Artificial Sequence: Synthetic oligonucleotide
  Target: LAMA2; (+) strand; PAM type: YTN; PAM sequence: TTC
ccatatataatgggcttagc

SEQ ID NO: 412608 - DNA, 20 bp, Artificial Sequence
  Description of Artificial Sequence: Synthetic oligonucleotide
  Target: LAMA2; (+) strand; PAM type: YTN; PAM sequence: CTT
agcgcatactaagcactgtg

SEQ ID NO: 412609 - DNA, 20 bp, Artificial Sequence
  Description of Artificial Sequence: Synthetic oligonucleotide
  Target: LAMA2; (+) strand; PAM type: YTN; PAM sequence: TTA
gcgcatactaagcactgtgt

SEQ ID NO: 412610 - DNA, 20 bp, Artificial Sequence
  Description of Artificial Sequence: Synthetic oligonucleotide
  Target: LAMA2; (+) strand; PAM type: YTN; PAM sequence: CTA
agcactgtgtacattgtttc

SEQ ID NO: 412611 - DNA, 20 bp, Artificial Sequence
  Description of Artificial Sequence: Synthetic oligonucleotide
  Target: LAMA2; (+) strand; PAM type: YTN; PAM sequence: CTG
tgtacattgtttcaattttt

SEQ ID NO: 412612 - DNA, 20 bp, Artificial Sequence
  Description of Artificial Sequence: Synthetic oligonucleotide
  Target: LAMA2; (+) strand; PAM type: YTN; PAM sequence: TTG
tttcaatttttcttggtaac

SEQ ID NO: 412613 - DNA, 20 bp, Artificial Sequence
  Description of Artificial Sequence: Synthetic oligonucleotide
  Target: LAMA2; (+) strand; PAM type: YTN; PAM sequence: TTT
caatttttcttggtaacatc

SEQ ID NO: 412614 - DNA, 20 bp, Artificial Sequence
  Description of Artificial Sequence: Synthetic oligonucleotide
  Target: LAMA2; (+) strand; PAM type: YTN; PAM sequence: TTC
aatttttcttggtaacatcg

SEQ ID NO: 412615 - DNA, 20 bp, Artificial Sequence
  Description of Artificial Sequence: Synthetic oligonucleotide
  Target: LAMA2; (+) strand; PAM type: YTN; PAM sequence: TTT
ttcttggtaacatcgttaga

SEQ ID NO: 412616 - DNA, 20 bp, Artificial Sequence
  Description of Artificial Sequence: Synthetic oligonucleotide
  Target: LAMA2; (+) strand; PAM type: YTN; PAM sequence: TTT
tcttggtaacatcgttagag

SEQ ID NO: 412617 - DNA, 20 bp, Artificial Sequence
  Description of Artificial Sequence: Synthetic oligonucleotide
  Target: LAMA2; (+) strand; PAM type: YTN; PAM sequence: TTT
cttggtaacatcgttagagt

SEQ ID NO: 412618 - DNA, 20 bp, Artificial Sequence
  Description of Artificial Sequence: Synthetic oligonucleotide
  Target: LAMA2; (+) strand; PAM type: YTN; PAM sequence: TTC
ttggtaacatcgttagagtc

SEQ ID NO: 412619 - DNA, 20 bp, Artificial Sequence
  Description of Artificial Sequence: Synthetic oligonucleotide
  Target: LAMA2; (+) strand; PAM type: YTN; PAM sequence: CTT
ggtaacatcgttagagtcct

SEQ ID NO: 412620 - DNA, 20 bp, Artificial Sequence
  Description of Artificial Sequence: Synthetic oligonucleotide
  Target: LAMA2; (+) strand; PAM type: YTN; PAM sequence: TTG
gtaacatcgttagagtcctt

SEQ ID NO: 412621 - DNA, 20 bp, Artificial Sequence
  Description of Artificial Sequence: Synthetic oligonucleotide
  Target: LAMA2; (+) strand; PAM type: YTN; PAM sequence: TTA
gagtccttatgtcttatact

SEQ ID NO: 412622 - DNA, 20 bp, Artificial Sequence
  Description of Artificial Sequence: Synthetic oligonucleotide
  Target: LAMA2; (+) strand; PAM type: YTN; PAM sequence: CTT
atgtcttatactctgcatat

SEQ ID NO: 412623 - DNA, 20 bp, Artificial Sequence
  Description of Artificial Sequence: Synthetic oligonucleotide
  Target: LAMA2; (+) strand; PAM type: YTN; PAM sequence: TTA
tgtcttatactctgcatatg

SEQ ID NO: 412624 - DNA, 20 bp, Artificial Sequence
  Description of Artificial Sequence: Synthetic oligonucleotide
  Target: LAMA2; (+) strand; PAM type: YTN; PAM sequence: CTT
atactctgcatatgtgaaat

SEQ ID NO: 412625 - DNA, 20 bp, Artificial Sequence
  Description of Artificial Sequence: Synthetic oligonucleotide
  Target: LAMA2; (+) strand; PAM type: YTN; PAM sequence: TTA
tactctgcatatgtgaaatt

SEQ ID NO: 412626 - DNA, 20 bp, Artificial Sequence
  Description of Artificial Sequence: Synthetic oligonucleotide
  Target: LAMA2; (+) strand; PAM type: YTN; PAM sequence: CTC
tgcatatgtgaaatttgttc

SEQ ID NO: 412627 - DNA, 20 bp, Artificial Sequence
  Description of Artificial Sequence: Synthetic oligonucleotide
  Target: LAMA2; (+) strand; PAM type: YTN; PAM sequence: CTG
catatgtgaaatttgttcag

SEQ ID NO: 412628 - DNA, 20 bp, Artificial Sequence
  Description of Artificial Sequence: Synthetic oligonucleotide
  Target: LAMA2; (+) strand; PAM type: YTN; PAM sequence: TTT
gttcaggattggcattaatg

SEQ ID NO: 412629 - DNA, 20 bp, Artificial Sequence
  Description of Artificial Sequence: Synthetic oligonucleotide
  Target: LAMA2; (+) strand; PAM type: YTN; PAM sequence: TTG
ttcaggattggcattaatga

SEQ ID NO: 412630 - DNA, 20 bp, Artificial Sequence
  Description of Artificial Sequence: Synthetic oligonucleotide
  Target: LAMA2; (+) strand; PAM type: YTN; PAM sequence: TTC
aggattggcattaatgactc

SEQ ID NO: 412631 - DNA, 20 bp, Artificial Sequence
  Description of Artificial Sequence: Synthetic oligonucleotide
  Target: LAMA2; (+) strand; PAM type: YTN; PAM sequence: TTG
gcattaatgactcctttctt

SEQ ID NO: 412632 - DNA, 20 bp, Artificial Sequence
  Description of Artificial Sequence: Synthetic oligonucleotide
  Target: LAMA2; (+) strand; PAM type: YTN; PAM sequence: TTA
atgactcctttcttttttgt

SEQ ID NO: 412633 - DNA, 20 bp, Artificial Sequence
  Description of Artificial Sequence: Synthetic oligonucleotide
  Target: LAMA2; (+) strand; PAM type: YTN; PAM sequence: CTC
ctttcttttttgtagattaa

SEQ ID NO: 412634 - DNA, 20 bp, Artificial Sequence
  Description of Artificial Sequence: Synthetic oligonucleotide
  Target: LAMA2; (+) strand; PAM type: YTN; PAM sequence: CTT
tcttttttgtagattaagat

SEQ ID NO: 412635 - DNA, 20 bp, Artificial Sequence
  Description of Artificial Sequence: Synthetic oligonucleotide
  Target: LAMA2; (+) strand; PAM type: YTN; PAM sequence: TTT
cttttttgtagattaagata

SEQ ID NO: 412636 - DNA, 20 bp, Artificial Sequence
  Description of Artificial Sequence: Synthetic oligonucleotide
  Target: LAMA2; (+) strand; PAM type: YTN; PAM sequence: TTC
ttttttgtagattaagataa

SEQ ID NO: 412637 - DNA, 20 bp, Artificial Sequence
  Description of Artificial Sequence: Synthetic oligonucleotide
  Target: LAMA2; (+) strand; PAM type: YTN; PAM sequence: CTT
ttttgtagattaagataatg

SEQ ID NO: 412638 - DNA, 20 bp, Artificial Sequence
  Description of Artificial Sequence: Synthetic oligonucleotide
  Target: LAMA2; (+) strand; PAM type: YTN; PAM sequence: TTT
tttgtagattaagataatga

SEQ ID NO: 412639 - DNA, 20 bp, Artificial Sequence
  Description of Artificial Sequence: Synthetic oligonucleotide
  Target: LAMA2; (+) strand; PAM type: YTN; PAM sequence: TTT
ttgtagattaagataatgag

SEQ ID NO: 412640 - DNA, 20 bp, Artificial Sequence
  Description of Artificial Sequence: Synthetic oligonucleotide
  Target: LAMA2; (+) strand; PAM type: YTN; PAM sequence: TTT
tgtagattaagataatgaga

SEQ ID NO: 412641 - DNA, 20 bp, Artificial Sequence
  Description of Artificial Sequence: Synthetic oligonucleotide
  Target: LAMA2; (+) strand; PAM type: YTN; PAM sequence: TTT
gtagattaagataatgagaa

SEQ ID NO: 412642 - DNA, 20 bp, Artificial Sequence
  Description of Artificial Sequence: Synthetic oligonucleotide
  Target: LAMA2; (+) strand; PAM type: YTN; PAM sequence: TTG
tagattaagataatgagaag

SEQ ID NO: 412643 - DNA, 20 bp, Artificial Sequence
  Description of Artificial Sequence: Synthetic oligonucleotide
  Target: LAMA2; (+) strand; PAM type: YTN; PAM sequence: TTA
agataatgagaagtaagcaa

SEQ ID NO: 412644 - DNA, 20 bp, Artificial Sequence
  Description of Artificial Sequence: Synthetic oligonucleotide
  Target: LAMA2; (+) strand; PAM type: YTN; PAM sequence: TTC
tttatgtagatggggcttcc

SEQ ID NO: 412645 - DNA, 20 bp, Artificial Sequence
  Description of Artificial Sequence: Synthetic oligonucleotide
  Target: LAMA2; (+) strand; PAM type: YTN; PAM sequence: CTT
tatgtagatggggcttccaa

SEQ ID NO: 412646 - DNA, 20 bp, Artificial Sequence
  Description of Artificial Sequence: Synthetic oligonucleotide
  Target: LAMA2; (+) strand; PAM type: YTN; PAM sequence: TTT
atgtagatggggcttccaac

SEQ ID NO: 412647 - DNA, 20 bp, Artificial Sequence
  Description of Artificial Sequence: Synthetic oligonucleotide
  Target: LAMA2; (+) strand; PAM type: YTN; PAM sequence: TTA
tgtagatggggcttccaaca

SEQ ID NO: 412648 - DNA, 20 bp, Artificial Sequence
  Description of Artificial Sequence: Synthetic oligonucleotide
  Target: LAMA2; (+) strand; PAM type: YTN; PAM sequence: CTT
ccaacagaaccatcagtccc

SEQ ID NO: 412649 - DNA, 20 bp, Artificial Sequence
  Description of Artificial Sequence: Synthetic oligonucleotide
  Target: LAMA2; (+) strand; PAM type: YTN; PAM sequence: TTC
caacagaaccatcagtccca

SEQ ID NO: 412650 - DNA, 20 bp, Artificial Sequence
  Description of Artificial Sequence: Synthetic oligonucleotide
  Target: LAMA2; (+) strand; PAM type: YTN; PAM sequence: CTG
gatgtcgtgggaatgctgta

SEQ ID NO: 412651 - DNA, 20 bp, Artificial Sequence
  Description of Artificial Sequence: Synthetic oligonucleotide
  Target: LAMA2; (+) strand; PAM type: YTN; PAM sequence: CTG
tatgttggtgggttacccat

SEQ ID NO: 412652 - DNA, 20 bp, Artificial Sequence
  Description of Artificial Sequence: Synthetic oligonucleotide
  Target: LAMA2; (+) strand; PAM type: YTN; PAM sequence: TTG
gtgggttacccatcaactac

SEQ ID NO: 412653 - DNA, 20 bp, Artificial Sequence
  Description of Artificial Sequence: Synthetic oligonucleotide
  Target: LAMA2; (+) strand; PAM type: YTN; PAM sequence: TTA
cccatcaactacactacccg

SEQ ID NO: 412654 - DNA, 20 bp, Artificial Sequence
  Description of Artificial Sequence: Synthetic oligonucleotide
  Target: LAMA2; (+) strand; PAM type: YTN; PAM sequence: CTA
cactacccgaagaattggtc

SEQ ID NO: 412655 - DNA, 20 bp, Artificial Sequence
  Description of Artificial Sequence: Synthetic oligonucleotide
  Target: LAMA2; (+) strand; PAM type: YTN; PAM sequence: CTA
cccgaagaattggtccagta

SEQ ID NO: 412656 - DNA, 20 bp, Artificial Sequence
  Description of Artificial Sequence: Synthetic oligonucleotide
  Target: LAMA2; (+) strand; PAM type: YTN; PAM sequence: TTG
gtccagtaaatatctgattt

SEQ ID NO: 412657 - DNA, 20 bp, Artificial Sequence
  Description of Artificial Sequence: Synthetic oligonucleotide
  Target: LAMA2; (+) strand; PAM type: YTN; PAM sequence: CTG
atttcttctttattacttaa

SEQ ID NO: 412658 - DNA, 20 bp, Artificial Sequence
  Description of Artificial Sequence: Synthetic oligonucleotide
  Target: LAMA2; (+) strand; PAM type: YTN; PAM sequence: TTT
cttctttattacttaaatat

SEQ ID NO: 412659 - DNA, 20 bp, Artificial Sequence
  Description of Artificial Sequence: Synthetic oligonucleotide
  Target: LAMA2; (+) strand; PAM type: YTN; PAM sequence: TTC
ttctttattacttaaatata

SEQ ID NO: 412660 - DNA, 20 bp, Artificial Sequence
  Description of Artificial Sequence: Synthetic oligonucleotide
  Target: LAMA2; (+) strand; PAM type: YTN; PAM sequence: CTT
ctttattacttaaatatatg

SEQ ID NO: 412661 - DNA, 20 bp, Artificial Sequence
  Description of Artificial Sequence: Synthetic oligonucleotide
  Target: LAMA2; (+) strand; PAM type: YTN; PAM sequence: TTC
tttattacttaaatatatgg

SEQ ID NO: 412662 - DNA, 20 bp, Artificial Sequence
  Description of Artificial Sequence: Synthetic oligonucleotide
  Target: LAMA2; (+) strand; PAM type: YTN; PAM sequence: CTT
tattacttaaatatatggct

SEQ ID NO: 412663 - DNA, 20 bp, Artificial Sequence
  Description of Artificial Sequence: Synthetic oligonucleotide
  Target: LAMA2; (+) strand; PAM type: YTN; PAM sequence: TTT
attacttaaatatatggctg

SEQ ID NO: 412664 - DNA, 20 bp, Artificial Sequence
  Description of Artificial Sequence: Synthetic oligonucleotide
  Target: LAMA2; (+) strand; PAM type: YTN; PAM sequence: TTA
ttacttaaatatatggctga

SEQ ID NO: 412665 - DNA, 20 bp, Artificial Sequence
  Description of Artificial Sequence: Synthetic oligonucleotide
  Target: LAMA2; (+) strand; PAM type: YTN; PAM sequence: TTA
cttaaatatatggctgattc

SEQ ID NO: 412666 - DNA, 20 bp, Artificial Sequence
  Description of Artificial Sequence: Synthetic oligonucleotide
  Target: LAMA2; (+) strand; PAM type: YTN; PAM sequence: CTT
aaatatatggctgattcatt

SEQ ID NO: 412667 - DNA, 20 bp, Artificial Sequence
  Description of Artificial Sequence: Synthetic oligonucleotide
  Target: LAMA2; (+) strand; PAM type: YTN; PAM sequence: TTA
aatatatggctgattcattt

SEQ ID NO: 412668 - DNA, 20 bp, Artificial Sequence
  Description of Artificial Sequence: Synthetic oligonucleotide
  Target: LAMA2; (+) strand; PAM type: YTN; PAM sequence: CTG
attcatttattgatatattt

SEQ ID NO: 412669 - DNA, 20 bp, Artificial Sequence
  Description of Artificial Sequence: Synthetic oligonucleotide
  Target: LAMA2; (+) strand; PAM type: YTN; PAM sequence: TTC
atttattgatatattttgac

SEQ ID NO: 412670 - DNA, 20 bp, Artificial Sequence
  Description of Artificial Sequence: Synthetic oligonucleotide
  Target: LAMA2; (+) strand; PAM type: YTN; PAM sequence: TTT
attgatatattttgacttat

SEQ ID NO: 412671 - DNA, 20 bp, Artificial Sequence
  Description of Artificial Sequence: Synthetic oligonucleotide
  Target: LAMA2; (+) strand; PAM type: YTN; PAM sequence: TTA
ttgatatattttgacttatt

SEQ ID NO: 412672 - DNA, 20 bp, Artificial Sequence
  Description of Artificial Sequence: Synthetic oligonucleotide
  Target: LAMA2; (+) strand; PAM type: YTN; PAM sequence: TTG
atatattttgacttattagg

SEQ ID NO: 412673 - DNA, 20 bp, Artificial Sequence
  Description of Artificial Sequence: Synthetic oligonucleotide
  Target: LAMA2; (+) strand; PAM type: YTN; PAM sequence: TTT
tgacttattaggtcacatgg

SEQ ID NO: 412674 - DNA, 20 bp, Artificial Sequence
  Description of Artificial Sequence: Synthetic oligonucleotide
  Target: LAMA2; (+) strand; PAM type: YTN; PAM sequence: TTT
gacttattaggtcacatggg

SEQ ID NO: 412675 - DNA, 20 bp, Artificial Sequence
  Description of Artificial Sequence: Synthetic oligonucleotide
  Target: LAMA2; (+) strand; PAM type: YTN; PAM sequence: TTG
acttattaggtcacatgggc

SEQ ID NO: 412676 - DNA, 20 bp, Artificial Sequence
  Description of Artificial Sequence: Synthetic oligonucleotide
  Target: LAMA2; (+) strand; PAM type: YTN; PAM sequence: CTT
attaggtcacatgggcccat

SEQ ID NO: 412677 - DNA, 20 bp, Artificial Sequence
  Description of Artificial Sequence: Synthetic oligonucleotide
  Target: LAMA2; (+) strand; PAM type: YTN; PAM sequence: TTA
ttaggtcacatgggcccatg

SEQ ID NO: 412678 - DNA, 20 bp, Artificial Sequence
  Description of Artificial Sequence: Synthetic oligonucleotide
  Target: LAMA2; (+) strand; PAM type: YTN; PAM sequence: TTA
ggtcacatgggcccatgaaa

SEQ ID NO: 412679 - DNA, 20 bp, Artificial Sequence
  Description of Artificial Sequence: Synthetic oligonucleotide
  Target: LAMA2; (+) strand; PAM type: YTN; PAM sequence: CTG
ataggtgaataggaagtcat

SEQ ID NO: 412680 - DNA, 20 bp, Artificial Sequence
  Description of Artificial Sequence: Synthetic oligonucleotide
  Target: LAMA2; (+) strand; PAM type: YTN; PAM sequence: CTT
ttctgataagggacagaagg

SEQ ID NO: 412681 - DNA, 20 bp, Artificial Sequence
  Description of Artificial Sequence: Synthetic oligonucleotide
  Target: LAMA2; (+) strand; PAM type: YTN; PAM sequence: TTT
tctgataagggacagaaggg

SEQ ID NO: 412682 - DNA, 20 bp, Artificial Sequence
  Description of Artificial Sequence: Synthetic oligonucleotide
  Target: LAMA2; (+) strand; PAM type: YTN; PAM sequence: TTT
ctgataagggacagaagggt

SEQ ID NO: 412683 - DNA, 20 bp, Artificial Sequence
  Description of Artificial Sequence: Synthetic oligonucleotide
  Target: LAMA2; (+) strand; PAM type: YTN; PAM sequence: TTC
tgataagggacagaagggtt

SEQ ID NO: 412684 - DNA, 20 bp, Artificial Sequence
  Description of Artificial Sequence: Synthetic oligonucleotide
  Target: LAMA2; (+) strand; PAM type: YTN; PAM sequence: CTG
ataagggacagaagggtttg

SEQ ID NO: 412685 - DNA, 20 bp, Artificial Sequence
  Description of Artificial Sequence: Synthetic oligonucleotide
  Target: LAMA2; (+) strand; PAM type: YTN; PAM sequence: TTT
gttgtttatttgtttgtttg

SEQ ID NO: 412686 - DNA, 20 bp, Artificial Sequence
  Description of Artificial Sequence: Synthetic oligonucleotide
  Target: LAMA2; (+) strand; PAM type: YTN; PAM sequence: TTG
ttgtttatttgtttgtttgt

SEQ ID NO: 412687 - DNA, 20 bp, Artificial Sequence
  Description of Artificial Sequence: Synthetic oligonucleotide
  Target: LAMA2; (+) strand; PAM type: YTN; PAM sequence: TTG
tttatttgtttgtttgtttg

SEQ ID NO: 412688 - DNA, 20 bp, Artificial Sequence
  Description of Artificial Sequence: Synthetic oligonucleotide
  Target: LAMA2; (+) strand; PAM type: YTN; PAM sequence: TTT
atttgtttgtttgtttgttt

SEQ ID NO: 412689 - DNA, 20 bp, Artificial Sequence
  Description of Artificial Sequence: Synthetic oligonucleotide
  Target: LAMA2; (+) strand; PAM type: YTN; PAM sequence: TTA
tttgtttgtttgtttgtttt

SEQ ID NO: 412690 - DNA, 20 bp, Artificial Sequence
  Description of Artificial Sequence: Synthetic oligonucleotide
  Target: LAMA2; (+) strand; PAM type: YTN; PAM sequence: TTT
gtttgtttgtttgttttgag

SEQ ID NO: 412691 - DNA, 20 bp, Artificial Sequence
  Description of Artificial Sequence: Synthetic oligonucleotide
  Target: LAMA2; (+) strand; PAM type: YTN; PAM sequence: TTG
tttgtttgtttgttttgaga

SEQ ID NO: 412692 - DNA, 20 bp, Artificial Sequence
  Description of Artificial Sequence: Synthetic oligonucleotide
  Target: LAMA2; (+) strand; PAM type: YTN; PAM sequence: TTT
gtttgtttgttttgagacag

SEQ ID NO: 412693 - DNA, 20 bp, Artificial Sequence
  Description of Artificial Sequence: Synthetic oligonucleotide
  Target: LAMA2; (+) strand; PAM type: YTN; PAM sequence: TTG
tttgtttgttttgagacaga

SEQ ID NO: 412694 - DNA, 20 bp, Artificial Sequence
  Description of Artificial Sequence: Synthetic oligonucleotide
  Target: LAMA2; (+) strand; PAM type: YTN; PAM sequence: TTT
gtttgttttgagacagagtc

SEQ ID NO: 412695 - DNA, 20 bp, Artificial Sequence
  Description of Artificial Sequence: Synthetic oligonucleotide
  Target: LAMA2; (+) strand; PAM type: YTN; PAM sequence: TTG
tttgttttgagacagagtct

SEQ ID NO: 412696 - DNA, 20 bp, Artificial Sequence
  Description of Artificial Sequence: Synthetic oligonucleotide
  Target: LAMA2; (+) strand; PAM type: YTN; PAM sequence: TTT
gttttgagacagagtctcgc

SEQ ID NO: 412697 - DNA, 20 bp, Artificial Sequence
  Description of Artificial Sequence: Synthetic oligonucleotide
  Target: LAMA2; (+) strand; PAM type: YTN; PAM sequence: TTG
ttttgagacagagtctcgct

SEQ ID NO: 412698 - DNA, 20 bp, Artificial Sequence
  Description of Artificial Sequence: Synthetic oligonucleotide
  Target: LAMA2; (+) strand; PAM type: YTN; PAM sequence: TTT
tgagacagagtctcgctctg

SEQ ID NO: 412699 - DNA, 20 bp, Artificial Sequence
  Description of Artificial Sequence: Synthetic oligonucleotide
  Target: LAMA2; (+) strand; PAM type: YTN; PAM sequence: TTT
gagacagagtctcgctctgt

SEQ ID NO: 412700 - DNA, 20 bp, Artificial Sequence
  Description of Artificial Sequence: Synthetic oligonucleotide
  Target: LAMA2; (+) strand; PAM type: YTN; PAM sequence: TTG
agacagagtctcgctctgtc

SEQ ID NO: 412701 - DNA, 20 bp, Artificial Sequence
  Description of Artificial Sequence: Synthetic oligonucleotide
  Target: LAMA2; (+) strand; PAM type: YTN; PAM sequence: CTC
gctctgtcgcccaggctgga

SEQ ID NO: 412702 - DNA, 20 bp, Artificial Sequence
  Description of Artificial Sequence: Synthetic oligonucleotide
  Target: LAMA2; (+) strand; PAM type: YTN; PAM sequence: CTC
tgtcgcccaggctggagtgc

SEQ ID NO: 412703 - DNA, 20 bp, Artificial Sequence
  Description of Artificial Sequence: Synthetic oligonucleotide
  Target: LAMA2; (+) strand; PAM type: YTN; PAM sequence: CTG
tcgcccaggctggagtgcag

SEQ ID NO: 412704 - DNA, 20 bp, Artificial Sequence
  Description of Artificial Sequence: Synthetic oligonucleotide
  Target: LAMA2; (+) strand; PAM type: YTN; PAM sequence: CTG
gagtgcagtggtgcgatctt

SEQ ID NO: 412705 - DNA, 20 bp, Artificial Sequence
  Description of Artificial Sequence: Synthetic oligonucleotide
  Target: LAMA2; (+) strand; PAM type: YTN; PAM sequence: CTT
ggctcactgcaagctctccc

SEQ ID NO: 412706 - DNA, 20 bp, Artificial Sequence
  Description of Artificial Sequence: Synthetic oligonucleotide
  Target: LAMA2; (+) strand; PAM type: YTN; PAM sequence: TTG
gctcactgcaagctctccct

SEQ ID NO: 412707 - DNA, 20 bp, Artificial Sequence
  Description of Artificial Sequence: Synthetic oligonucleotide
  Target: LAMA2; (+) strand; PAM type: YTN; PAM sequence: CTC
actgcaagctctccctcccg

SEQ ID NO: 412708 - DNA, 20 bp, Artificial Sequence
  Description of Artificial Sequence: Synthetic oligonucleotide
  Target: LAMA2; (+) strand; PAM type: YTN; PAM sequence: CTG
caagctctccctcccgggtt

SEQ ID NO: 412709 - DNA, 20 bp, Artificial Sequence
  Description of Artificial Sequence: Synthetic oligonucleotide
  Target: LAMA2; (+) strand; PAM type: YTN; PAM sequence: CTC
tccctcccgggttcacgcca

SEQ ID NO: 412710 - DNA, 20 bp, Artificial Sequence
  Description of Artificial Sequence: Synthetic oligonucleotide
  Target: LAMA2; (+) strand; PAM type: YTN; PAM sequence: CTC
cctcccgggttcacgccatt

SEQ ID NO: 412711 - DNA, 20 bp, Artificial Sequence
  Description of Artificial Sequence: Synthetic oligonucleotide
  Target: LAMA2; (+) strand; PAM type: YTN; PAM sequence: CTC
ccgggttcacgccattctcc

SEQ ID NO: 412712 - DNA, 20 bp, Artificial Sequence
  Description of Artificial Sequence: Synthetic oligonucleotide
  Target: LAMA2; (+) strand; PAM type: YTN; PAM sequence: TTC
acgccattctcctgcctcag

SEQ ID NO: 412713 - DNA, 20 bp, Artificial Sequence
  Description of Artificial Sequence: Synthetic oligonucleotide
  Target: LAMA2; (+) strand; PAM type: YTN; PAM sequence: TTC
tcctgcctcagcctccctag

SEQ ID NO: 412714 - DNA, 20 bp, Artificial Sequence
  Description of Artificial Sequence: Synthetic oligonucleotide
  Target: LAMA2; (+) strand; PAM type: YTN; PAM sequence: CTC
ctgcctcagcctccctagta

SEQ ID NO: 412715 - DNA, 20 bp, Artificial Sequence
  Description of Artificial Sequence: Synthetic oligonucleotide
  Target: LAMA2; (+) strand; PAM type: YTN; PAM sequence: CTG
cctcagcctccctagtagct

SEQ ID NO: 412716 - DNA, 20 bp, Artificial Sequence
  Description of Artificial Sequence: Synthetic oligonucleotide
  Target: LAMA2; (+) strand; PAM type: YTN; PAM sequence: CTC
agcctccctagtagctggga

SEQ ID NO: 412717 - DNA, 20 bp, Artificial Sequence
  Description of Artificial Sequence: Synthetic oligonucleotide
  Target: LAMA2; (+) strand; PAM type: YTN; PAM sequence: CTC
cctagtagctgggactacag

SEQ ID NO: 412718 - DNA, 20 bp, Artificial Sequence
  Description of Artificial Sequence: Synthetic oligonucleotide
  Target: LAMA2; (+) strand; PAM type: YTN; PAM sequence: CTA
gtagctgggactacaggtgc

SEQ ID NO: 412719 - DNA, 20 bp, Artificial Sequence
  Description of Artificial Sequence: Synthetic oligonucleotide
  Target: LAMA2; (+) strand; PAM type: YTN; PAM sequence: CTG
ggactacaggtgcctaccac

SEQ ID NO: 412720 - DNA, 20 bp, Artificial Sequence
  Description of Artificial Sequence: Synthetic oligonucleotide
  Target: LAMA2; (+) strand; PAM type: YTN; PAM sequence: CTA
caggtgcctaccaccacgcc

SEQ ID NO: 412721 - DNA, 20 bp, Artificial Sequence
  Description of Artificial Sequence: Synthetic oligonucleotide
  Target: LAMA2; (+) strand; PAM type: YTN; PAM sequence: CTA
ccaccacgcctggctaattt

SEQ ID NO: 412722 - DNA, 20 bp, Artificial Sequence
  Description of Artificial Sequence: Synthetic oligonucleotide
  Target: LAMA2; (+) strand; PAM type: YTN; PAM sequence: CTG
gctaattttttgtactttta

SEQ ID NO: 412723 - DNA, 20 bp, Artificial Sequence
  Description of Artificial Sequence: Synthetic oligonucleotide
  Target: LAMA2; (+) strand; PAM type: YTN; PAM sequence: CTA
attttttgtacttttaatag

SEQ ID NO: 412724 - DNA, 20 bp, Artificial Sequence
  Description of Artificial Sequence: Synthetic oligonucleotide
  Target: LAMA2; (+) strand; PAM type: YTN; PAM sequence: TTT
tttgtacttttaatagagac

SEQ ID NO: 412725 - DNA, 20 bp, Artificial Sequence
  Description of Artificial Sequence: Synthetic oligonucleotide
  Target: LAMA2; (+) strand; PAM type: YTN; PAM sequence: TTT
ttgtacttttaatagagacg

SEQ ID NO: 412726 - DNA, 20 bp, Artificial Sequence
  Description of Artificial Sequence: Synthetic oligonucleotide
  Target: LAMA2; (+) strand; PAM type: YTN; PAM sequence: TTT
tgtacttttaatagagacgg

SEQ ID NO: 412727 - DNA, 20 bp, Artificial Sequence
  Description of Artificial Sequence: Synthetic oligonucleotide
  Target: LAMA2; (+) strand; PAM type: YTN; PAM sequence: TTT
gtacttttaatagagacggg

SEQ ID NO: 412728 - DNA, 20 bp, Artificial Sequence
  Description of Artificial Sequence: Synthetic oligonucleotide
  Target: LAMA2; (+) strand; PAM type: YTN; PAM sequence: TTG
tacttttaatagagacgggg

SEQ ID NO: 412729 - DNA, 20 bp, Artificial Sequence
  Description of Artificial Sequence: Synthetic oligonucleotide
  Target: LAMA2; (+) strand; PAM type: YTN; PAM sequence: CTT
ttaatagagacggggtgtac

SEQ ID NO: 412730 - DNA, 20 bp, Artificial Sequence
  Description of Artificial Sequence: Synthetic oligonucleotide
  Target: LAMA2; (+) strand; PAM type: YTN; PAM sequence: TTT
taatagagacggggtgtact

SEQ ID NO: 412731 - DNA, 20 bp, Artificial Sequence
  Description of Artificial Sequence: Synthetic oligonucleotide
  Target: LAMA2; (+) strand; PAM type: YTN; PAM sequence: TTT
aatagagacggggtgtactt

SEQ ID NO: 412732 - DNA, 20 bp, Artificial Sequence
  Description of Artificial Sequence: Synthetic oligonucleotide
  Target: LAMA2; (+) strand; PAM type: YTN; PAM sequence: TTA
atagagacggggtgtacttt

SEQ ID NO: 412733 - DNA, 20 bp, Artificial Sequence
  Description of Artificial Sequence: Synthetic oligonucleotide
  Target: LAMA2; (+) strand; PAM type: YTN; PAM sequence: CTT
ttaatagagacggggggttt

SEQ ID NO: 412734 - DNA, 20 bp, Artificial Sequence
  Description of Artificial Sequence: Synthetic oligonucleotide
  Target: LAMA2; (+) strand; PAM type: YTN; PAM sequence: TTT
taatagagacggggggtttc

SEQ ID NO: 412735 - DNA, 20 bp, Artificial Sequence
  Description of Artificial Sequence: Synthetic oligonucleotide
  Target: LAMA2; (+) strand; PAM type: YTN; PAM sequence: TTT
aatagagacggggggtttca

SEQ ID NO: 412736 - DNA, 20 bp, Artificial Sequence
  Description of Artificial Sequence: Synthetic oligonucleotide
  Target: LAMA2; (+) strand; PAM type: YTN; PAM sequence: TTA
atagagacggggggtttcac

SEQ ID NO: 412737 - DNA, 20 bp, Artificial Sequence
  Description of Artificial Sequence: Synthetic oligonucleotide
  Target: LAMA2; (+) strand; PAM type: YTN; PAM sequence: TTT
cactgtgttagccaggatgg

SEQ ID NO: 412738 - DNA, 20 bp, Artificial Sequence
  Description of Artificial Sequence: Synthetic oligonucleotide
  Target: LAMA2; (+) strand; PAM type: YTN; PAM sequence: TTC
actgtgttagccaggatggt

SEQ ID NO: 412739 - DNA, 20 bp, Artificial Sequence
  Description of Artificial Sequence: Synthetic oligonucleotide
  Target: LAMA2; (+) strand; PAM type: YTN; PAM sequence: CTG
tgttagccaggatggtctca

SEQ ID NO: 412740 - DNA, 20 bp, Artificial Sequence
  Description of Artificial Sequence: Synthetic oligonucleotide
  Target: LAMA2; (+) strand; PAM type: YTN; PAM sequence: TTA
gccaggatggtctcaatctc

SEQ ID NO: 412741 - DNA, 20 bp, Artificial Sequence
  Description of Artificial Sequence: Synthetic oligonucleotide
  Target: LAMA2; (+) strand; PAM type: YTN; PAM sequence: CTC
aatctcctgacctcatgatc

SEQ ID NO: 412742 - DNA, 20 bp, Artificial Sequence
  Description of Artificial Sequence: Synthetic oligonucleotide
  Target: LAMA2; (+) strand; PAM type: YTN; PAM sequence: CTC
ctgacctcatgatccgcctg

SEQ ID NO: 412743 - DNA, 20 bp, Artificial Sequence
  Description of Artificial Sequence: Synthetic oligonucleotide
  Target: LAMA2; (+) strand; PAM type: YTN; PAM sequence: CTG
acctcatgatccgcctgcct

SEQ ID NO: 412744 - DNA, 20 bp, Artificial Sequence
  Description of Artificial Sequence: Synthetic oligonucleotide
  Target: LAMA2; (+) strand; PAM type: YTN; PAM sequence: CTC
atgatccgcctgcctcggcc

SEQ ID NO: 412745 - DNA, 20 bp, Artificial Sequence
  Description of Artificial Sequence: Synthetic oligonucleotide
  Target: LAMA2; (+) strand; PAM type: YTN; PAM sequence: CTG
cctcggcctcccaaagtgct

SEQ ID NO: 412746 - DNA, 20 bp, Artificial Sequence
  Description of Artificial Sequence: Synthetic oligonucleotide
  Target: LAMA2; (+) strand; PAM type: YTN; PAM sequence: CTC
ggcctcccaaagtgctggga

SEQ ID NO: 412747 - DNA, 20 bp, Artificial Sequence
  Description of Artificial Sequence: Synthetic oligonucleotide
  Target: LAMA2; (+) strand; PAM type: YTN; PAM sequence: CTC
ccaaagtgctgggattacag

SEQ ID NO: 412748 - DNA, 20 bp, Artificial Sequence
  Description of Artificial Sequence: Synthetic oligonucleotide
  Target: LAMA2; (+) strand; PAM type: YTN; PAM sequence: CTG
ggattacaggcctgagccac

SEQ ID NO: 412749 - DNA, 20 bp, Artificial Sequence
  Description of Artificial Sequence: Synthetic oligonucleotide
  Target: LAMA2; (+) strand; PAM type: YTN; PAM sequence: TTA
caggcctgagccacctcgcc

SEQ ID NO: 412750 - DNA, 20 bp, Artificial Sequence
  Description of Artificial Sequence: Synthetic oligonucleotide
  Target: LAMA2; (+) strand; PAM type: YTN; PAM sequence: CTG
agccacctcgcccagctgac

SEQ ID NO: 412751 - DNA, 20 bp, Artificial Sequence
  Description of Artificial Sequence: Synthetic oligonucleotide
  Target: LAMA2; (+) strand; PAM type: YTN; PAM sequence: CTC
gcccagctgacagaaggttt

SEQ ID NO: 412752 - DNA, 20 bp, Artificial Sequence
  Description of Artificial Sequence: Synthetic oligonucleotide
  Target: LAMA2; (+) strand; PAM type: YTN; PAM sequence: CTG
acagaaggttttttagatag

SEQ ID NO: 412753 - DNA, 20 bp, Artificial Sequence
  Description of Artificial Sequence: Synthetic oligonucleotide
  Target: LAMA2; (+) strand; PAM type: YTN; PAM sequence: TTT
tttagatagattagattatg

SEQ ID NO: 412754 - DNA, 20 bp, Artificial Sequence
  Description of Artificial Sequence: Synthetic oligonucleotide
  Target: LAMA2; (+) strand; PAM type: YTN; PAM sequence: TTT
ttagatagattagattatga

SEQ ID NO: 412755 - DNA, 20 bp, Artificial Sequence
  Description of Artificial Sequence: Synthetic oligonucleotide
  Target: LAMA2; (+) strand; PAM type: YTN; PAM sequence: TTT
tagatagattagattatgag

SEQ ID NO: 412756 - DNA, 20 bp, Artificial Sequence
  Description of Artificial Sequence: Synthetic oligonucleotide
  Target: LAMA2; (+) strand; PAM type: YTN; PAM sequence: TTT
agatagattagattatgaga

SEQ ID NO: 412757 - DNA, 20 bp, Artificial Sequence
  Description of Artificial Sequence: Synthetic oligonucleotide
  Target: LAMA2; (+) strand; PAM type: YTN; PAM sequence: TTA
gatagattagattatgagag

SEQ ID NO: 412758 - DNA, 20 bp, Artificial Sequence
  Description of Artificial Sequence: Synthetic oligonucleotide
  Target: LAMA2; (+) strand; PAM type: YTN; PAM sequence: TTA
gattatgagagacaatgcca

SEQ ID NO: 412759 - DNA, 20 bp, Artificial Sequence
  Description of Artificial Sequence: Synthetic oligonucleotide
  Target: LAMA2; (+) strand; PAM type: YTN; PAM sequence: TTA
tgagagacaatgccacggaa

SEQ ID NO: 412760 - DNA, 20 bp, Artificial Sequence
  Description of Artificial Sequence: Synthetic oligonucleotide
  Target: LAMA2; (+) strand; PAM type: YTN; PAM sequence: CTG
agtggggaacctggagccaa

SEQ ID NO: 412761 - DNA, 20 bp, Artificial Sequence
  Description of Artificial Sequence: Synthetic oligonucleotide
  Target: LAMA2; (+) strand; PAM type: YTN; PAM sequence: CTG
gagccaaactgtcttggttt

SEQ ID NO: 412762 - DNA, 20 bp, Artificial Sequence
  Description of Artificial Sequence: Synthetic oligonucleotide
  Target: LAMA2; (+) strand; PAM type: YTN; PAM sequence: CTG
tcttggtttgaatacctatt

SEQ ID NO: 412763 - DNA, 20 bp, Artificial Sequence
  Description of Artificial Sequence: Synthetic oligonucleotide
  Target: LAMA2; (+) strand; PAM type: YTN; PAM sequence: CTT
ggtttgaatacctatttaac

SEQ ID NO: 412764 - DNA, 20 bp, Artificial Sequence
  Description of Artificial Sequence: Synthetic oligonucleotide
  Target: LAMA2; (+) strand; PAM type: YTN; PAM sequence: TTG
gtttgaatacctatttaact

SEQ ID NO: 412765 - DNA, 20 bp, Artificial Sequence
  Description of Artificial Sequence: Synthetic oligonucleotide
  Target: LAMA2; (+) strand; PAM type: YTN; PAM sequence: TTT
gaatacctatttaactattg

SEQ ID NO: 412766 - DNA, 20 bp, Artificial Sequence
  Description of Artificial Sequence: Synthetic oligonucleotide
  Target: LAMA2; (+) strand; PAM type: YTN; PAM sequence: TTG
aatacctatttaactattga

SEQ ID NO: 412767 - DNA, 20 bp, Artificial Sequence
  Description of Artificial Sequence: Synthetic oligonucleotide
  Target: LAMA2; (+) strand; PAM type: YTN; PAM sequence: CTA
tttaactattgactagctgt

SEQ ID NO: 412768 - DNA, 20 bp, Artificial Sequence
  Description of Artificial Sequence: Synthetic oligonucleotide
  Target: LAMA2; (+) strand; PAM type: YTN; PAM sequence: TTT
aactattgactagctgtgtg

SEQ ID NO: 412769 - DNA, 20 bp, Artificial Sequence
  Description of Artificial Sequence: Synthetic oligonucleotide
  Target: LAMA2; (+) strand; PAM type: YTN; PAM sequence: TTA
actattgactagctgtgtgt

SEQ ID NO: 412770 - DNA, 20 bp, Artificial Sequence
  Description of Artificial Sequence: Synthetic oligonucleotide
  Target: LAMA2; (+) strand; PAM type: YTN; PAM sequence: CTA
ttgactagctgtgtgttttg

SEQ ID NO: 412771 - DNA, 20 bp, Artificial Sequence
  Description of Artificial Sequence: Synthetic oligonucleotide
  Target: LAMA2; (+) strand; PAM type: YTN; PAM sequence: TTG
actagctgtgtgttttggag

SEQ ID NO: 412772 - DNA, 20 bp, Artificial Sequence
  Description of Artificial Sequence: Synthetic oligonucleotide
  Target: LAMA2; (+) strand; PAM type: YTN; PAM sequence: CTA
gctgtgtgttttggagcaag

SEQ ID NO: 412773 - DNA, 20 bp, Artificial Sequence
  Description of Artificial Sequence: Synthetic oligonucleotide
  Target: LAMA2; (+) strand; PAM type: YTN; PAM sequence: CTG
tgtgttttggagcaagttaa

SEQ ID NO: 412774 - DNA, 20 bp, Artificial Sequence
  Description of Artificial Sequence: Synthetic oligonucleotide
  Target: LAMA2; (+) strand; PAM type: YTN; PAM sequence: TTT
tggagcaagttaatcttttt

SEQ ID NO: 412775 - DNA, 20 bp, Artificial Sequence
  Description of Artificial Sequence: Synthetic oligonucleotide
  Target: LAMA2; (+) strand; PAM type: YTN; PAM sequence: TTT
ggagcaagttaatctttttt

SEQ ID NO: 412776 - DNA, 20 bp, Artificial Sequence
  Description of Artificial Sequence: Synthetic oligonucleotide
  Target: LAMA2; (+) strand; PAM type: YTN; PAM sequence: TTG
gagcaagttaatctttttta

SEQ ID NO: 412777 - DNA, 20 bp, Artificial Sequence
  Description of Artificial Sequence: Synthetic oligonucleotide
  Target: LAMA2; (+) strand; PAM type: YTN; PAM sequence: TTA
atcttttttaacaaagattt

SEQ ID NO: 412778 - DNA, 20 bp, Artificial Sequence
  Description of Artificial Sequence: Synthetic oligonucleotide
  Target: LAMA2; (+) strand; PAM type: YTN; PAM sequence: CTT
ttttaacaaagatttctctt

SEQ ID NO: 412779 - DNA, 20 bp, Artificial Sequence
  Description of Artificial Sequence: Synthetic oligonucleotide
  Target: LAMA2; (+) strand; PAM type: YTN; PAM sequence: TTT
tttaacaaagatttctcttt

SEQ ID NO: 412780 - DNA, 20 bp, Artificial Sequence
  Description of Artificial Sequence: Synthetic oligonucleotide
  Target: LAMA2; (+) strand; PAM type: YTN; PAM sequence: TTT
ttaacaaagatttctctttt

SEQ ID NO: 412781 - DNA, 20 bp, Artificial Sequence
  Description of Artificial Sequence: Synthetic oligonucleotide
  Target: LAMA2; (+) strand; PAM type: YTN; PAM sequence: TTT
taacaaagatttctcttttg

SEQ ID NO: 412782 - DNA, 20 bp, Artificial Sequence
  Description of Artificial Sequence: Synthetic oligonucleotide
  Target: LAMA2; (+) strand; PAM type: YTN; PAM sequence: TTT
aacaaagatttctcttttgc

SEQ ID NO: 412783 - DNA, 20 bp, Artificial Sequence
  Description of Artificial Sequence: Synthetic oligonucleotide
  Target: LAMA2; (+) strand; PAM type: YTN; PAM sequence: TTA
acaaagatttctcttttgca

SEQ ID NO: 412784 - DNA, 20 bp, Artificial Sequence
  Description of Artificial Sequence: Synthetic oligonucleotide
  Target: LAMA2; (+) strand; PAM type: YTN; PAM sequence: TTT
ctcttttgcaaaacagggta

SEQ ID NO: 412785 - DNA, 20 bp, Artificial Sequence
  Description of Artificial Sequence: Synthetic oligonucleotide
  Target: LAMA2; (+) strand; PAM type: YTN; PAM sequence: TTC
tcttttgcaaaacagggtaa

SEQ ID NO: 412786 - DNA, 20 bp, Artificial Sequence
  Description of Artificial Sequence: Synthetic oligonucleotide
  Target: LAMA2; (+) strand; PAM type: YTN; PAM sequence: CTC
ttttgcaaaacagggtaatg

SEQ ID NO: 412787 - DNA, 20 bp, Artificial Sequence
  Description of Artificial Sequence: Synthetic oligonucleotide
  Target: LAMA2; (+) strand; PAM type: YTN; PAM sequence: CTT
ttgcaaaacagggtaatgat

SEQ ID NO: 412788 - DNA, 20 bp, Artificial Sequence
  Description of Artificial Sequence: Synthetic oligonucleotide
  Target: LAMA2; (+) strand; PAM type: YTN; PAM sequence: TTT
tgcaaaacagggtaatgata

SEQ ID NO: 412789 - DNA, 20 bp, Artificial Sequence
  Description of Artificial Sequence: Synthetic oligonucleotide
  Target: LAMA2; (+) strand; PAM type: YTN; PAM sequence: TTT
gcaaaacagggtaatgataa

SEQ ID NO: 412790 - DNA, 20 bp, Artificial Sequence
  Description of Artificial Sequence: Synthetic oligonucleotide
  Target: LAMA2; (+) strand; PAM type: YTN; PAM sequence: TTG
caaaacagggtaatgataat

SEQ ID NO: 412791 - DNA, 20 bp, Artificial Sequence
  Description of Artificial Sequence: Synthetic oligonucleotide
  Target: LAMA2; (+) strand; PAM type: YTN; PAM sequence: CTA
aacaaaaaggattgcataaa

SEQ ID NO: 412792 - DNA, 20 bp, Artificial Sequence
  Description of Artificial Sequence: Synthetic oligonucleotide
  Target: LAMA2; (+) strand; PAM type: YTN; PAM sequence: TTG
cataaagattaaatgaggta

SEQ ID NO: 412793 - DNA, 20 bp, Artificial Sequence
  Description of Artificial Sequence: Synthetic oligonucleotide
  Target: LAMA2; (+) strand; PAM type: YTN; PAM sequence: TTA
aatgaggtaatttatttaaa

SEQ ID NO: 412794 - DNA, 20 bp, Artificial Sequence
  Description of Artificial Sequence: Synthetic oligonucleotide
  Target: LAMA2; (+) strand; PAM type: YTN; PAM sequence: TTT
atttaaagtgattgggttgg

SEQ ID NO: 412795 - DNA, 20 bp, Artificial Sequence
  Description of Artificial Sequence: Synthetic oligonucleotide
  Target: LAMA2; (+) strand; PAM type: YTN; PAM sequence: TTA
tttaaagtgattgggttggg

SEQ ID NO: 412796 - DNA, 20 bp, Artificial Sequence
  Description of Artificial Sequence: Synthetic oligonucleotide
  Target: LAMA2; (+) strand; PAM type: YTN; PAM sequence: TTT
aaagtgattgggttgggcat

SEQ ID NO: 412797 - DNA, 20 bp, Artificial Sequence
  Description of Artificial Sequence: Synthetic oligonucleotide
  Target: LAMA2; (+) strand; PAM type: YTN; PAM sequence: TTA
aagtgattgggttgggcatg

SEQ ID NO: 412798 - DNA, 20 bp, Artificial Sequence
  Description of Artificial Sequence: Synthetic oligonucleotide
  Target: LAMA2; (+) strand; PAM type: YTN; PAM sequence: TTG
ggttgggcatggtggctcac

SEQ ID NO: 412799 - DNA, 20 bp, Artificial Sequence
  Description of Artificial Sequence: Synthetic oligonucleotide
  Target: LAMA2; (+) strand; PAM type: YTN; PAM sequence: TTG
ggcatggtggctcacacctg

SEQ ID NO: 412800 - DNA, 20 bp, Artificial Sequence
  Description of Artificial Sequence: Synthetic oligonucleotide
  Target: LAMA2; (+) strand; PAM type: YTN; PAM sequence: CTC
acacctgtaatcccagcact

SEQ ID NO: 412801 - DNA, 20 bp, Artificial Sequence
  Description of Artificial Sequence: Synthetic oligonucleotide
  Target: LAMA2; (+) strand; PAM type: YTN; PAM sequence: CTG
taatcccagcactttgggag

SEQ ID NO: 412802 - DNA, 20 bp, Artificial Sequence
  Description of Artificial Sequence: Synthetic oligonucleotide
  Target: LAMA2; (+) strand; PAM type: YTN; PAM sequence: CTT
tgggaggccaaggcaggcag

SEQ ID NO: 412803 - DNA, 20 bp, Artificial Sequence
  Description of Artificial Sequence: Synthetic oligonucleotide
  Target: LAMA2; (+) strand; PAM type: YTN; PAM sequence: TTT
gggaggccaaggcaggcaga

SEQ ID NO: 412804 - DNA, 20 bp, Artificial Sequence
  Description of Artificial Sequence: Synthetic oligonucleotide
  Target: LAMA2; (+) strand; PAM type: YTN; PAM sequence: TTG
ggaggccaaggcaggcagat

SEQ ID NO: 412805 - DNA, 20 bp, Artificial Sequence
  Description of Artificial Sequence: Synthetic oligonucleotide
  Target: LAMA2; (+) strand; PAM type: YTN; PAM sequence: CTT
gagaccaggagttcaagatg

SEQ ID NO: 412806 - DNA, 20 bp, Artificial Sequence
  Description of Artificial Sequence: Synthetic oligonucleotide
  Target: LAMA2; (+) strand; PAM type: YTN; PAM sequence: TTG
agaccaggagttcaagatga

SEQ ID NO: 412807 - DNA, 20 bp, Artificial Sequence
  Description of Artificial Sequence: Synthetic oligonucleotide
  Target: LAMA2; (+) strand; PAM type: YTN; PAM sequence: TTC
aagatgagcctggccatcat

SEQ ID NO: 412808 - DNA, 20 bp, Artificial Sequence
  Description of Artificial Sequence: Synthetic oligonucleotide
  Target: LAMA2; (+) strand; PAM type: YTN; PAM sequence: CTG
gccatcatagcaaaaccctg

SEQ ID NO: 412809 - DNA, 20 bp, Artificial Sequence
  Description of Artificial Sequence: Synthetic oligonucleotide
  Target: LAMA2; (+) strand; PAM type: YTN; PAM sequence: CTG
tctctacaaaaatacaaaaa

SEQ ID NO: 412810 - DNA, 20 bp, Artificial Sequence
  Description of Artificial Sequence: Synthetic oligonucleotide
  Target: LAMA2; (+) strand; PAM type: YTN; PAM sequence: CTC
tacaaaaatacaaaaagtta

SEQ ID NO: 412811 - DNA, 20 bp, Artificial Sequence
  Description of Artificial Sequence: Synthetic oligonucleotide
  Target: LAMA2; (+) strand; PAM type: YTN; PAM sequence: CTA
caaaaatacaaaaagttagc

SEQ ID NO: 412812 - DNA, 20 bp, Artificial Sequence
  Description of Artificial Sequence: Synthetic oligonucleotide
  Target: LAMA2; (+) strand; PAM type: YTN; PAM sequence: TTA
gccaggtgtggtggtgtgtg

SEQ ID NO: 412813 - DNA, 20 bp, Artificial Sequence
  Description of Artificial Sequence: Synthetic oligonucleotide
  Target: LAMA2; (+) strand; PAM type: YTN; PAM sequence: CTG
tagtcccagctactttggag

SEQ ID NO: 412814 - DNA, 20 bp, Artificial Sequence
  Description of Artificial Sequence: Synthetic oligonucleotide
  Target: LAMA2; (+) strand; PAM type: YTN; PAM sequence: CTA
ctttggaggctgaggcaaga

SEQ ID NO: 412815 - DNA, 20 bp, Artificial Sequence
  Description of Artificial Sequence: Synthetic oligonucleotide
  Target: LAMA2; (+) strand; PAM type: YTN; PAM sequence: CTT
tggaggctgaggcaagagaa

SEQ ID NO: 412816 - DNA, 20 bp, Artificial Sequence
  Description of Artificial Sequence: Synthetic oligonucleotide
  Target: LAMA2; (+) strand; PAM type: YTN; PAM sequence: TTT
ggaggctgaggcaagagaat

SEQ ID NO: 412817 - DNA, 20 bp, Artificial Sequence
  Description of Artificial Sequence: Synthetic oligonucleotide
  Target: LAMA2; (+) strand; PAM type: YTN; PAM sequence: TTG
gaggctgaggcaagagaatc

SEQ ID NO: 412818 - DNA, 20 bp, Artificial Sequence
  Description of Artificial Sequence: Synthetic oligonucleotide
  Target: LAMA2; (+) strand; PAM type: YTN; PAM sequence: CTG
aggcaagagaatcacttgaa

SEQ ID NO: 412819 - DNA, 20 bp, Artificial Sequence
  Description of Artificial Sequence: Synthetic oligonucleotide
  Target: LAMA2; (+) strand; PAM type: YTN; PAM sequence: CTT
gaacccgagggtcagaggtt

SEQ ID NO: 412820 - DNA, 20 bp, Artificial Sequence
  Description of Artificial Sequence: Synthetic oligonucleotide
  Target: LAMA2; (+) strand; PAM type: YTN; PAM sequence: TTG
aacccgagggtcagaggttg

SEQ ID NO: 412821 - DNA, 20 bp, Artificial Sequence
  Description of Artificial Sequence: Synthetic oligonucleotide
  Target: LAMA2; (+) strand; PAM type: YTN; PAM sequence: TTG
cagtgagctgtaatagcacc

SEQ ID NO: 412822 - DNA, 20 bp, Artificial Sequence
  Description of Artificial Sequence: Synthetic oligonucleotide
  Target: LAMA2; (+) strand; PAM type: YTN; PAM sequence: CTG
taatagcaccactgcattcc

SEQ ID NO: 412823 - DNA, 20 bp, Artificial Sequence
  Description of Artificial Sequence: Synthetic oligonucleotide
  Target: LAMA2; (+) strand; PAM type: YTN; PAM sequence: CTG
cattccagcctgggcaacag

SEQ ID NO: 412824 - DNA, 20 bp, Artificial Sequence
  Description of Artificial Sequence: Synthetic oligonucleotide
  Target: LAMA2; (+) strand; PAM type: YTN; PAM sequence: TTC
cagcctgggcaacagagcga

SEQ ID NO: 412825 - DNA, 20 bp, Artificial Sequence
  Description of Artificial Sequence: Synthetic oligonucleotide
  Target: LAMA2; (+) strand; PAM type: YTN; PAM sequence: CTG
ggcaacagagcgagaccctg

SEQ ID NO: 412826 - DNA, 20 bp, Artificial Sequence
  Description of Artificial Sequence: Synthetic oligonucleotide
  Target: LAMA2; (+) strand; PAM type: YTN; PAM sequence: CTG
tctcaaaaaaataaataaat

SEQ ID NO: 412827 - DNA, 20 bp, Artificial Sequence
  Description of Artificial Sequence: Synthetic oligonucleotide
  Target: LAMA2; (+) strand; PAM type: YTN; PAM sequence: CTC
aaaaaaataaataaataaat

SEQ ID NO: 412828 - DNA, 20 bp, Artificial Sequence
  Description of Artificial Sequence: Synthetic oligonucleotide
  Target: LAMA2; (+) strand; PAM type: YTN; PAM sequence: TTG
gaagagtagcaggcatataa

SEQ ID NO: 412829 - DNA, 20 bp, Artificial Sequence
  Description of Artificial Sequence: Synthetic oligonucleotide
  Target: LAMA2; (+) strand; PAM type: YTN; PAM sequence: CTG
aaagatgaaaatgatggtat

SEQ ID NO: 412830 - DNA, 20 bp, Artificial Sequence
  Description of Artificial Sequence: Synthetic oligonucleotide
  Target: LAMA2; (+) strand; PAM type: YTN; PAM sequence: TTC
atggtgtttcaggcatagag

SEQ ID NO: 412831 - DNA, 20 bp, Artificial Sequence
  Description of Artificial Sequence: Synthetic oligonucleotide
  Target: LAMA2; (+) strand; PAM type: YTN; PAM sequence: TTT
caggcatagagatttagcaa

SEQ ID NO: 412832 - DNA, 20 bp, Artificial Sequence
  Description of Artificial Sequence: Synthetic oligonucleotide
  Target: LAMA2; (+) strand; PAM type: YTN; PAM sequence: TTC
aggcatagagatttagcaaa

SEQ ID NO: 412833 - DNA, 20 bp, Artificial Sequence
  Description of Artificial Sequence: Synthetic oligonucleotide
  Target: LAMA2; (+) strand; PAM type: YTN; PAM sequence: TTT
agcaaatattgagaggtgca

SEQ ID NO: 412834 - DNA, 20 bp, Artificial Sequence
  Description of Artificial Sequence: Synthetic oligonucleotide
  Target: LAMA2; (+) strand; PAM type: YTN; PAM sequence: TTA
gcaaatattgagaggtgcag

SEQ ID NO: 412835 - DNA, 20 bp, Artificial Sequence
  Description of Artificial Sequence: Synthetic oligonucleotide
  Target: LAMA2; (+) strand; PAM type: YTN; PAM sequence: TTG
agaggtgcagtagttacagt

SEQ ID NO: 412836 - DNA, 20 bp, Artificial Sequence
  Description of Artificial Sequence: Synthetic oligonucleotide
  Target: LAMA2; (+) strand; PAM type: YTN; PAM sequence: TTA
cagtacagttatccaatttt

SEQ ID NO: 412837 - DNA, 20 bp, Artificial Sequence
  Description of Artificial Sequence: Synthetic oligonucleotide
  Target: LAMA2; (+) strand; PAM type: YTN; PAM sequence: TTA
tccaattttggattcagaat

SEQ ID NO: 412838 - DNA, 20 bp, Artificial Sequence
  Description of Artificial Sequence: Synthetic oligonucleotide
  Target: LAMA2; (+) strand; PAM type: YTN; PAM sequence: TTT
tggattcagaatttaaagcc

SEQ ID NO: 412839 - DNA, 20 bp, Artificial Sequence
  Description of Artificial Sequence: Synthetic oligonucleotide
  Target: LAMA2; (+) strand; PAM type: YTN; PAM sequence: TTT
ggattcagaatttaaagccc

SEQ ID NO: 412840 - DNA, 20 bp, Artificial Sequence
  Description of Artificial Sequence: Synthetic oligonucleotide
  Target: LAMA2; (+) strand; PAM type: YTN; PAM sequence: TTG
gattcagaatttaaagccct

SEQ ID NO: 412841 - DNA, 20 bp, Artificial Sequence
  Description of Artificial Sequence: Synthetic oligonucleotide
  Target: LAMA2; (+) strand; PAM type: YTN; PAM sequence: TTC
agaatttaaagccctcacag

SEQ ID NO: 412842 - DNA, 20 bp, Artificial Sequence
  Description of Artificial Sequence: Synthetic oligonucleotide
  Target: LAMA2; (+) strand; PAM type: YTN; PAM sequence: TTT
aaagccctcacagttttgta

SEQ ID NO: 412843 - DNA, 20 bp, Artificial Sequence
  Description of Artificial Sequence: Synthetic oligonucleotide
  Target: LAMA2; (+) strand; PAM type: YTN; PAM sequence: TTA
aagccctcacagttttgtaa

SEQ ID NO: 412844 - DNA, 20 bp, Artificial Sequence
  Description of Artificial Sequence: Synthetic oligonucleotide
  Target: LAMA2; (+) strand; PAM type: YTN; PAM sequence: CTC
acagttttgtaaatcaatat

SEQ ID NO: 412845 - DNA, 20 bp, Artificial Sequence
  Description of Artificial Sequence: Synthetic oligonucleotide
  Target: LAMA2; (+) strand; PAM type: YTN; PAM sequence: TTT
tgtaaatcaatattcacaaa

SEQ ID NO: 412846 - DNA, 20 bp, Artificial Sequence
  Description of Artificial Sequence: Synthetic oligonucleotide
  Target: LAMA2; (+) strand; PAM type: YTN; PAM sequence: TTT
gtaaatcaatattcacaaaa

SEQ ID NO: 412847 - DNA, 20 bp, Artificial Sequence
  Description of Artificial Sequence: Synthetic oligonucleotide
  Target: LAMA2; (+) strand; PAM type: YTN; PAM sequence: TTG
taaatcaatattcacaaaat

SEQ ID NO: 412848 - DNA, 20 bp, Artificial Sequence
  Description of Artificial Sequence: Synthetic oligonucleotide
  Target: LAMA2; (+) strand; PAM type: YTN; PAM sequence: TTC
acaaaataattttttattag

SEQ ID NO: 412849 - DNA, 20 bp, Artificial Sequence
  Description of Artificial Sequence: Synthetic oligonucleotide
  Target: LAMA2; (+) strand; PAM type: YTN; PAM sequence: TTT
tttattagaccgtgtatcct

SEQ ID NO: 412850 - DNA, 20 bp, Artificial Sequence
  Description of Artificial Sequence: Synthetic oligonucleotide
  Target: LAMA2; (+) strand; PAM type: YTN; PAM sequence: TTT
ttattagaccgtgtatccta

SEQ ID NO: 412851 - DNA, 20 bp, Artificial Sequence
  Description of Artificial Sequence: Synthetic oligonucleotide
  Target: LAMA2; (+) strand; PAM type: YTN; PAM sequence: TTT
tattagaccgtgtatcctag

SEQ ID NO: 412852 - DNA, 20 bp, Artificial Sequence
  Description of Artificial Sequence: Synthetic oligonucleotide
  Target: LAMA2; (+) strand; PAM type: YTN; PAM sequence: TTT
attagaccgtgtatcctagt

SEQ ID NO: 412853 - DNA, 20 bp, Artificial Sequence
  Description of Artificial Sequence: Synthetic oligonucleotide
  Target: LAMA2; (+) strand; PAM type: YTN; PAM sequence: TTA
ttagaccgtgtatcctagtt

SEQ ID NO: 412854 - DNA, 20 bp, Artificial Sequence
  Description of Artificial Sequence: Synthetic oligonucleotide
  Target: LAMA2; (+) strand; PAM type: YTN; PAM sequence: TTA
gaccgtgtatcctagtttgc

SEQ ID NO: 412855 - DNA, 20 bp, Artificial Sequence
  Description of Artificial Sequence: Synthetic oligonucleotide
  Target: LAMA2; (+) strand; PAM type: YTN; PAM sequence: CTA
gtttgctttggaaagtgtta

SEQ ID NO: 412856 - DNA, 20 bp, Artificial Sequence
  Description of Artificial Sequence: Synthetic oligonucleotide
  Target: LAMA2; (+) strand; PAM type: YTN; PAM sequence: TTT
gctttggaaagtgttactct

SEQ ID NO: 412857 - DNA, 20 bp, Artificial Sequence
  Description of Artificial Sequence: Synthetic oligonucleotide
  Target: LAMA2; (+) strand; PAM type: YTN; PAM sequence: TTG
ctttggaaagtgttactctg

SEQ ID NO: 412858 - DNA, 20 bp, Artificial Sequence
  Description of Artificial Sequence: Synthetic oligonucleotide
  Target: LAMA2; (+) strand; PAM type: YTN; PAM sequence: CTT
tggaaagtgttactctgaga

SEQ ID NO: 412859 - DNA, 20 bp, Artificial Sequence
  Description of Artificial Sequence: Synthetic oligonucleotide
  Target: LAMA2; (+) strand; PAM type: YTN; PAM sequence: TTT
ggaaagtgttactctgagag

SEQ ID NO: 412860 - DNA, 20 bp, Artificial Sequence
  Description of Artificial Sequence: Synthetic oligonucleotide
  Target: LAMA2; (+) strand; PAM type: YTN; PAM sequence: TTG
gaaagtgttactctgagaga

SEQ ID NO: 412861 - DNA, 20 bp, Artificial Sequence
  Description of Artificial Sequence: Synthetic oligonucleotide
  Target: LAMA2; (+) strand; PAM type: YTN; PAM sequence: TTA
ctctgagagaagcacggggg

SEQ ID NO: 412862 - DNA, 20 bp, Artificial Sequence
  Description of Artificial Sequence: Synthetic oligonucleotide
  Target: LAMA2; (+) strand; PAM type: YTN; PAM sequence: CTC
tgagagaagcacgggggatt

SEQ ID NO: 412863 - DNA, 20 bp, Artificial Sequence
  Description of Artificial Sequence: Synthetic oligonucleotide
  Target: LAMA2; (+) strand; PAM type: YTN; PAM sequence: CTG
agagaagcacgggggattga

SEQ ID NO: 412864 - DNA, 20 bp, Artificial Sequence
  Description of Artificial Sequence: Synthetic oligonucleotide
  Target: LAMA2; (+) strand; PAM type: YTN; PAM sequence: TTG
attggtgcttttagagaaca

SEQ ID NO: 412865 - DNA, 20 bp, Artificial Sequence
  Description of Artificial Sequence: Synthetic oligonucleotide
  Target: LAMA2; (+) strand; PAM type: YTN; PAM sequence: TTG
gtgcttttagagaacacact

SEQ ID NO: 412866 - DNA, 20 bp, Artificial Sequence
  Description of Artificial Sequence: Synthetic oligonucleotide
  Target: LAMA2; (+) strand; PAM type: YTN; PAM sequence: CTT
ttagagaacacactagatac

SEQ ID NO: 412867 - DNA, 20 bp, Artificial Sequence
  Description of Artificial Sequence: Synthetic oligonucleotide
  Target: LAMA2; (+) strand; PAM type: YTN; PAM sequence: TTT
tagagaacacactagataca

SEQ ID NO: 412868 - DNA, 20 bp, Artificial Sequence
  Description of Artificial Sequence: Synthetic oligonucleotide
  Target: LAMA2; (+) strand; PAM type: YTN; PAM sequence: TTT
agagaacacactagatacaa

SEQ ID NO: 412869 - DNA, 20 bp, Artificial Sequence
  Description of Artificial Sequence: Synthetic oligonucleotide
  Target: LAMA2; (+) strand; PAM type: YTN; PAM sequence: TTA
gagaacacactagatacaaa

SEQ ID NO: 412870 - DNA, 20 bp, Artificial Sequence
  Description of Artificial Sequence: Synthetic oligonucleotide
  Target: LAMA2; (+) strand; PAM type: YTN; PAM sequence: CTA
gatacaaatgtgatacattt

SEQ ID NO: 412871 - DNA, 20 bp, Artificial Sequence
  Description of Artificial Sequence: Synthetic oligonucleotide
  Target: LAMA2; (+) strand; PAM type: YTN; PAM sequence: TTT
ctatactcaaattagaacac

SEQ ID NO: 412872 - DNA, 20 bp, Artificial Sequence
  Description of Artificial Sequence: Synthetic oligonucleotide
  Target: LAMA2; (+) strand; PAM type: YTN; PAM sequence: TTC
tatactcaaattagaacaca

SEQ ID NO: 412873 - DNA, 20 bp, Artificial Sequence
  Description of Artificial Sequence: Synthetic oligonucleotide
  Target: LAMA2; (+) strand; PAM type: YTN; PAM sequence: CTA
tactcaaattagaacacatg

SEQ ID NO: 412874 - DNA, 20 bp, Artificial Sequence
  Description of Artificial Sequence: Synthetic oligonucleotide
  Target: LAMA2; (+) strand; PAM type: YTN; PAM sequence: CTC
aaattagaacacatgataat

SEQ ID NO: 412875 - DNA, 20 bp, Artificial Sequence
  Description of Artificial Sequence: Synthetic oligonucleotide
  Target: LAMA2; (+) strand; PAM type: YTN; PAM sequence: TTA
gaacacatgataatgtagat

SEQ ID NO: 412876 - DNA, 20 bp, Artificial Sequence
  Description of Artificial Sequence: Synthetic oligonucleotide
  Target: LAMA2; (+) strand; PAM type: YTN; PAM sequence: TTT
gttcattcatcaaagacaat

SEQ ID NO: 412877 - DNA, 20 bp, Artificial Sequence
  Description of Artificial Sequence: Synthetic oligonucleotide
  Target: LAMA2; (+) strand; PAM type: YTN; PAM sequence: TTG
ttcattcatcaaagacaatc

SEQ ID NO: 412878 - DNA, 20 bp, Artificial Sequence
  Description of Artificial Sequence: Synthetic oligonucleotide
  Target: LAMA2; (+) strand; PAM type: YTN; PAM sequence: TTC
attcatcaaagacaatcacc

SEQ ID NO: 412879 - DNA, 20 bp, Artificial Sequence
  Description of Artificial Sequence: Synthetic oligonucleotide
  Target: LAMA2; (+) strand; PAM type: YTN; PAM sequence: TTC
atcaaagacaatcacccatt

SEQ ID NO: 412880 - DNA, 20 bp, Artificial Sequence
  Description of Artificial Sequence: Synthetic oligonucleotide
  Target: LAMA2; (+) strand; PAM type: YTN; PAM sequence: TTA
tagttgtaattctcagtatt

SEQ ID NO: 412881 - DNA, 20 bp, Artificial Sequence
  Description of Artificial Sequence: Synthetic oligonucleotide
  Target: LAMA2; (+) strand; PAM type: YTN; PAM sequence: TTG
taattctcagtatttggctt

SEQ ID NO: 412882 - DNA, 20 bp, Artificial Sequence
  Description of Artificial Sequence: Synthetic oligonucleotide
  Target: LAMA2; (+) strand; PAM type: YTN; PAM sequence: TTC
tcagtatttggcttctcttg

SEQ ID NO: 412883 - DNA, 20 bp, Artificial Sequence
  Description of Artificial Sequence: Synthetic oligonucleotide
  Target: LAMA2; (+) strand; PAM type: YTN; PAM sequence: CTC
agtatttggcttctcttgtg

SEQ ID NO: 412884 - DNA, 20 bp, Artificial Sequence
  Description of Artificial Sequence: Synthetic oligonucleotide
  Target: LAMA2; (+) strand; PAM type: YTN; PAM sequence: TTT
ggcttctcttgtggatgatc

SEQ ID NO: 412885 - DNA, 20 bp, Artificial Sequence
  Description of Artificial Sequence: Synthetic oligonucleotide
  Target: LAMA2; (+) strand; PAM type: YTN; PAM sequence: TTG
gcttctcttgtggatgatca

SEQ ID NO: 412886 - DNA, 20 bp, Artificial Sequence
  Description of Artificial Sequence: Synthetic oligonucleotide
  Target: LAMA2; (+) strand; PAM type: YTN; PAM sequence: CTT
ctcttgtggatgatcagtat

SEQ ID NO: 412887 - DNA, 20 bp, Artificial Sequence
  Description of Artificial Sequence: Synthetic oligonucleotide
  Target: LAMA2; (+) strand; PAM type: YTN; PAM sequence: TTC
tcttgtggatgatcagtatt

SEQ ID NO: 412888 - DNA, 20 bp, Artificial Sequence
  Description of Artificial Sequence: Synthetic oligonucleotide
  Target: LAMA2; (+) strand; PAM type: YTN; PAM sequence: CTC
ttgtggatgatcagtattac

SEQ ID NO: 412889 - DNA, 20 bp, Artificial Sequence
  Description of Artificial Sequence: Synthetic oligonucleotide
  Target: LAMA2; (+) strand; PAM type: YTN; PAM sequence: CTT
gtggatgatcagtattactt

SEQ ID NO: 412890 - DNA, 20 bp, Artificial Sequence
  Description of Artificial Sequence: Synthetic oligonucleotide
  Target: LAMA2; (+) strand; PAM type: YTN; PAM sequence: TTG
tggatgatcagtattacttt

SEQ ID NO: 412891 - DNA, 20 bp, Artificial Sequence
  Description of Artificial Sequence: Synthetic oligonucleotide
  Target: LAMA2; (+) strand; PAM type: YTN; PAM sequence: TTA
cttttctttcataggtattg

SEQ ID NO: 412892 - DNA, 20 bp, Artificial Sequence
  Description of Artificial Sequence: Synthetic oligonucleotide
  Target: LAMA2; (+) strand; PAM type: YTN; PAM sequence: CTT
ttctttcataggtattggat

SEQ ID NO: 412893 - DNA, 20 bp, Artificial Sequence
  Description of Artificial Sequence: Synthetic oligonucleotide
  Target: LAMA2; (+) strand; PAM type: YTN; PAM sequence: TTT
tctttcataggtattggata

SEQ ID NO: 412894 - DNA, 20 bp, Artificial Sequence
  Description of Artificial Sequence: Synthetic oligonucleotide
  Target: LAMA2; (+) strand; PAM type: YTN; PAM sequence: TTT
ctttcataggtattggatat

SEQ ID NO: 412895 - DNA, 20 bp, Artificial Sequence
  Description of Artificial Sequence: Synthetic oligonucleotide
  Target: LAMA2; (+) strand; PAM type: YTN; PAM sequence: TTC
tttcataggtattggatatg

SEQ ID NO: 412896 - DNA, 20 bp, Artificial Sequence
  Description of Artificial Sequence: Synthetic oligonucleotide
  Target: LAMA2; (+) strand; PAM type: YTN; PAM sequence: CTT
tcataggtattggatatgct

SEQ ID NO: 412897 - DNA, 20 bp, Artificial Sequence
  Description of Artificial Sequence: Synthetic oligonucleotide
  Target: LAMA2; (+) strand; PAM type: YTN; PAM sequence: TTT
cataggtattggatatgctt

SEQ ID NO: 412898 - DNA, 20 bp, Artificial Sequence
  Description of Artificial Sequence: Synthetic oligonucleotide
  Target: LAMA2; (+) strand; PAM type: YTN; PAM sequence: TTC
ataggtattggatatgcttt

SEQ ID NO: 412899 - DNA, 20 bp, Artificial Sequence
  Description of Artificial Sequence: Synthetic oligonucleotide
  Target: LAMA2; (+) strand; PAM type: YTN; PAM sequence: TTG
gatatgctttttaggtctat

SEQ ID NO: 412900 - DNA, 20 bp, Artificial Sequence
  Description of Artificial Sequence: Synthetic oligonucleotide
  Target: LAMA2; (+) strand; PAM type: YTN; PAM sequence: CTT
tttaggtctatcaaaaacta

SEQ ID NO: 412901 - DNA, 20 bp, Artificial Sequence
  Description of Artificial Sequence: Synthetic oligonucleotide
  Target: LAMA2; (+) strand; PAM type: YTN; PAM sequence: TTT
ttaggtctatcaaaaactaa

SEQ ID NO: 412902 - DNA, 20 bp, Artificial Sequence
  Description of Artificial Sequence: Synthetic oligonucleotide
  Target: LAMA2; (+) strand; PAM type: YTN; PAM sequence: TTT
taggtctatcaaaaactaaa

SEQ ID NO: 412903 - DNA, 20 bp, Artificial Sequence
  Description of Artificial Sequence: Synthetic oligonucleotide
  Target: LAMA2; (+) strand; PAM type: YTN; PAM sequence: TTT
aggtctatcaaaaactaaag

SEQ ID NO: 412904 - DNA, 20 bp, Artificial Sequence
  Description of Artificial Sequence: Synthetic oligonucleotide
  Target: LAMA2; (+) strand; PAM type: YTN; PAM sequence: TTA
ggtctatcaaaaactaaagt

SEQ ID NO: 412905 - DNA, 20 bp, Artificial Sequence
  Description of Artificial Sequence: Synthetic oligonucleotide
  Target: LAMA2; (+) strand; PAM type: YTN; PAM sequence: CTA
tcaaaaactaaagtctctga

SEQ ID NO: 412906 - DNA, 20 bp, Artificial Sequence
  Description of Artificial Sequence: Synthetic oligonucleotide
  Target: LAMA2; (+) strand; PAM type: YTN; PAM sequence: CTA
aagtctctgaagtgacactg

SEQ ID NO: 412907 - DNA, 20 bp, Artificial Sequence
  Description of Artificial Sequence: Synthetic oligonucleotide
  Target: LAMA2; (+) strand; PAM type: YTN; PAM sequence: CTC
tgaagtgacactggtacaag

SEQ ID NO: 412908 - DNA, 20 bp, Artificial Sequence
  Description of Artificial Sequence: Synthetic oligonucleotide
  Target: LAMA2; (+) strand; PAM type: YTN; PAM sequence: CTG
aagtgacactggtacaagca

SEQ ID NO: 412909 - DNA, 20 bp, Artificial Sequence
  Description of Artificial Sequence: Synthetic oligonucleotide
  Target: LAMA2; (+) strand; PAM type: YTN; PAM sequence: CTG
gtacaagcaattcacttgaa

SEQ ID NO: 412910 - DNA, 20 bp, Artificial Sequence
  Description of Artificial Sequence: Synthetic oligonucleotide
  Target: LAMA2; (+) strand; PAM type: YTN; PAM sequence: TTC
acttgaatttctaaaaacag

SEQ ID NO: 412911 - DNA, 20 bp, Artificial Sequence
  Description of Artificial Sequence: Synthetic oligonucleotide
  Target: LAMA2; (+) strand; PAM type: YTN; PAM sequence: CTT
gaatttctaaaaacagataa

SEQ ID NO: 412912 - DNA, 20 bp, Artificial Sequence
  Description of Artificial Sequence: Synthetic oligonucleotide
  Target: LAMA2; (+) strand; PAM type: YTN; PAM sequence: TTG
aatttctaaaaacagataaa

SEQ ID NO: 412913 - DNA, 20 bp, Artificial Sequence
  Description of Artificial Sequence: Synthetic oligonucleotide
  Target: LAMA2; (+) strand; PAM type: YTN; PAM sequence: TTT
ctaaaaacagataaaatata

SEQ ID NO: 412914 - DNA, 20 bp, Artificial Sequence
  Description of Artificial Sequence: Synthetic oligonucleotide
  Target: LAMA2; (+) strand; PAM type: YTN; PAM sequence: TTC
taaaaacagataaaatataa

SEQ ID NO: 412915 - DNA, 20 bp, Artificial Sequence
  Description of Artificial Sequence: Synthetic oligonucleotide
  Target: LAMA2; (+) strand; PAM type: YTN; PAM sequence: CTA
aaaacagataaaatataatg

SEQ ID NO: 412916 - DNA, 20 bp, Artificial Sequence
  Description of Artificial Sequence: Synthetic oligonucleotide
  Target: LAMA2; (+) strand; PAM type: YTN; PAM sequence: TTG
agttacttctaaattccttg

SEQ ID NO: 412917 - DNA, 20 bp, Artificial Sequence
  Description of Artificial Sequence: Synthetic oligonucleotide
  Target: LAMA2; (+) strand; PAM type: YTN; PAM sequence: TTA
cttctaaattccttgaaccc

SEQ ID NO: 412918 - DNA, 20 bp, Artificial Sequence
  Description of Artificial Sequence: Synthetic oligonucleotide
  Target: LAMA2; (+) strand; PAM type: YTN; PAM sequence: CTT
ctaaattccttgaaccccca

SEQ ID NO: 412919 - DNA, 20 bp, Artificial Sequence
  Description of Artificial Sequence: Synthetic oligonucleotide
  Target: LAMA2; (+) strand; PAM type: YTN; PAM sequence: TTC
taaattccttgaacccccaa

SEQ ID NO: 412920 - DNA, 20 bp, Artificial Sequence
  Description of Artificial Sequence: Synthetic oligonucleotide
  Target: LAMA2; (+) strand; PAM type: YTN; PAM sequence: CTA
aattccttgaacccccaatg

SEQ ID NO: 412921 - DNA, 20 bp, Artificial Sequence
  Description of Artificial Sequence: Synthetic oligonucleotide
  Target: LAMA2; (+) strand; PAM type: YTN; PAM sequence: TTC
cttgaacccccaatgtttca

SEQ ID NO: 412922 - DNA, 20 bp, Artificial Sequence
  Description of Artificial Sequence: Synthetic oligonucleotide
  Target: LAMA2; (+) strand; PAM type: YTN; PAM sequence: CTT
gaacccccaatgtttcatgc

SEQ ID NO: 412923 - DNA, 20 bp, Artificial Sequence
  Description of Artificial Sequence: Synthetic oligonucleotide
  Target: LAMA2; (+) strand; PAM type: YTN; PAM sequence: TTG
aacccccaatgtttcatgca

SEQ ID NO: 412924 - DNA, 20 bp, Artificial Sequence
  Description of Artificial Sequence: Synthetic oligonucleotide
  Target: LAMA2; (+) strand; PAM type: YTN; PAM sequence: TTT
catgcaaactttcaagtttt

SEQ ID NO: 412925 - DNA, 20 bp, Artificial Sequence
  Description of Artificial Sequence: Synthetic oligonucleotide
  Target: LAMA2; (+) strand; PAM type: YTN; PAM sequence: TTC
atgcaaactttcaagtttta

SEQ ID NO: 412926 - DNA, 20 bp, Artificial Sequence
  Description of Artificial Sequence: Synthetic oligonucleotide
  Target: LAMA2; (+) strand; PAM type: YTN; PAM sequence: CTT
tcaagttttatgcatatttg

SEQ ID NO: 412927 - DNA, 20 bp, Artificial Sequence
  Description of Artificial Sequence: Synthetic oligonucleotide
  Target: LAMA2; (+) strand; PAM type: YTN; PAM sequence: TTT
caagttttatgcatatttgc

SEQ ID NO: 412928 - DNA, 20 bp, Artificial Sequence
  Description of Artificial Sequence: Synthetic oligonucleotide
  Target: LAMA2; (+) strand; PAM type: YTN; PAM sequence: TTC
aagttttatgcatatttgca

SEQ ID NO: 412929 - DNA, 20 bp, Artificial Sequence
  Description of Artificial Sequence: Synthetic oligonucleotide
  Target: LAMA2; (+) strand; PAM type: YTN; PAM sequence: TTT
tatgcatatttgcattttct

SEQ ID NO: 412930 - DNA, 20 bp, Artificial Sequence
  Description of Artificial Sequence: Synthetic oligonucleotide
  Target: LAMA2; (+) strand; PAM type: YTN; PAM sequence: TTT
atgcatatttgcattttctt

SEQ ID NO: 412931 - DNA, 20 bp, Artificial Sequence
  Description of Artificial Sequence: Synthetic oligonucleotide
  Target: LAMA2; (+) strand; PAM type: YTN; PAM sequence: TTA
tgcatatttgcattttctta

SEQ ID NO: 412932 - DNA, 20 bp, Artificial Sequence
  Description of Artificial Sequence: Synthetic oligonucleotide
  Target: LAMA2; (+) strand; PAM type: YTN; PAM sequence: TTT
gcattttcttaggggagggt

SEQ ID NO: 412933 - DNA, 20 bp, Artificial Sequence
  Description of Artificial Sequence: Synthetic oligonucleotide
  Target: LAMA2; (+) strand; PAM type: YTN; PAM sequence: TTG
cattttcttaggggagggtc

SEQ ID NO: 412934 - DNA, 20 bp, Artificial Sequence
  Description of Artificial Sequence: Synthetic oligonucleotide
  Target: LAMA2; (+) strand; PAM type: YTN; PAM sequence: TTT
tcttaggggagggtctgctg

SEQ ID NO: 412935 - DNA, 20 bp, Artificial Sequence
  Description of Artificial Sequence: Synthetic oligonucleotide
  Target: LAMA2; (+) strand; PAM type: YTN; PAM sequence: TTT
cttaggggagggtctgctgc

SEQ ID NO: 412936 - DNA, 20 bp, Artificial Sequence
  Description of Artificial Sequence: Synthetic oligonucleotide
  Target: LAMA2; (+) strand; PAM type: YTN; PAM sequence: TTC
ttaggggagggtctgctgct

SEQ ID NO: 412937 - DNA, 20 bp, Artificial Sequence
  Description of Artificial Sequence: Synthetic oligonucleotide
  Target: LAMA2; (+) strand; PAM type: YTN; PAM sequence: CTT
aggggagggtctgctgcttt

SEQ ID NO: 412938 - DNA, 20 bp, Artificial Sequence
  Description of Artificial Sequence: Synthetic oligonucleotide
  Target: LAMA2; (+) strand; PAM type: YTN; PAM sequence: TTA
ggggagggtctgctgctttc

SEQ ID NO: 412939 - DNA, 20 bp, Artificial Sequence
  Description of Artificial Sequence: Synthetic oligonucleotide
  Target: LAMA2; (+) strand; PAM type: YTN; PAM sequence: CTG
ctgctttcattagatattca

SEQ ID NO: 412940 - DNA, 20 bp, Artificial Sequence
  Description of Artificial Sequence: Synthetic oligonucleotide
  Target: LAMA2; (+) strand; PAM type: YTN; PAM sequence: CTG
ctttcattagatattcaaaa

SEQ ID NO: 412941 - DNA, 20 bp, Artificial Sequence
  Description of Artificial Sequence: Synthetic oligonucleotide
  Target: LAMA2; (+) strand; PAM type: YTN; PAM sequence: CTT
tcattagatattcaaaagga

SEQ ID NO: 412942 - DNA, 20 bp, Artificial Sequence
  Description of Artificial Sequence: Synthetic oligonucleotide
  Target: LAMA2; (+) strand; PAM type: YTN; PAM sequence: TTT
cattagatattcaaaaggaa

SEQ ID NO: 412943 - DNA, 20 bp, Artificial Sequence
  Description of Artificial Sequence: Synthetic oligonucleotide
  Target: LAMA2; (+) strand; PAM type: YTN; PAM sequence: TTC
attagatattcaaaaggaag

SEQ ID NO: 412944 - DNA, 20 bp, Artificial Sequence
  Description of Artificial Sequence: Synthetic oligonucleotide
  Target: LAMA2; (+) strand; PAM type: YTN; PAM sequence: TTA
gatattcaaaaggaagaagc

SEQ ID NO: 412945 - DNA, 20 bp, Artificial Sequence
  Description of Artificial Sequence: Synthetic oligonucleotide
  Target: LAMA2; (+) strand; PAM type: YTN; PAM sequence: TTC
aaaaggaagaagcactgaac

SEQ ID NO: 412946 - DNA, 20 bp, Artificial Sequence
  Description of Artificial Sequence: Synthetic oligonucleotide
  Target: LAMA2; (+) strand; PAM type: YTN; PAM sequence: CTG
aaccaaacctaattaccttt

SEQ ID NO: 412947 - DNA, 20 bp, Artificial Sequence
  Description of Artificial Sequence: Synthetic oligonucleotide
  Target: LAMA2; (+) strand; PAM type: YTN; PAM sequence: CTA
attaccttttcaaatagaaa

SEQ ID NO: 412948 - DNA, 20 bp, Artificial Sequence
  Description of Artificial Sequence: Synthetic oligonucleotide
  Target: LAMA2; (+) strand; PAM type: YTN; PAM sequence: TTA
ccttttcaaatagaaattga

SEQ ID NO: 412949 - DNA, 20 bp, Artificial Sequence
  Description of Artificial Sequence: Synthetic oligonucleotide
  Target: LAMA2; (+) strand; PAM type: YTN; PAM sequence: CTT
ttcaaatagaaattgaacat

SEQ ID NO: 412950 - DNA, 20 bp, Artificial Sequence
  Description of Artificial Sequence: Synthetic oligonucleotide
  Target: LAMA2; (+) strand; PAM type: YTN; PAM sequence: TTT
tcaaatagaaattgaacata

SEQ ID NO: 412951 - DNA, 20 bp, Artificial Sequence
  Description of Artificial Sequence: Synthetic oligonucleotide
  Target: LAMA2; (+) strand; PAM type: YTN; PAM sequence: TTT
caaatagaaattgaacatag

SEQ ID NO: 412952 - DNA, 20 bp, Artificial Sequence
  Description of Artificial Sequence: Synthetic oligonucleotide
  Target: LAMA2; (+) strand; PAM type: YTN; PAM sequence: TTC
aaatagaaattgaacatagg

SEQ ID NO: 412953 - DNA, 20 bp, Artificial Sequence
  Description of Artificial Sequence: Synthetic oligonucleotide
  Target: LAMA2; (+) strand; PAM type: YTN; PAM sequence: TTG
aacataggctatgacaaaat

SEQ ID NO: 412954 - DNA, 20 bp, Artificial Sequence
  Description of Artificial Sequence: Synthetic oligonucleotide
  Target: LAMA2; (+) strand; PAM type: YTN; PAM sequence: CTA
tgacaaaatgggtatatagt

SEQ ID NO: 412955 - DNA, 20 bp, Artificial Sequence
  Description of Artificial Sequence: Synthetic oligonucleotide
  Target: LAMA2; (+) strand; PAM type: YTN; PAM sequence: TTA
ataaactattaatagaaaca

SEQ ID NO: 412956 - DNA, 20 bp, Artificial Sequence
  Description of Artificial Sequence: Synthetic oligonucleotide
  Target: LAMA2; (+) strand; PAM type: YTN; PAM sequence: CTA
ttaatagaaacataaaatca

SEQ ID NO: 412957 - DNA, 20 bp, Artificial Sequence
  Description of Artificial Sequence: Synthetic oligonucleotide
  Target: LAMA2; (+) strand; PAM type: YTN; PAM sequence: TTA
atagaaacataaaatcagga

SEQ ID NO: 412958 - DNA, 20 bp, Artificial Sequence
  Description of Artificial Sequence: Synthetic oligonucleotide
  Target: LAMA2; (+) strand; PAM type: YTN; PAM sequence: TTA
aaacttatgataccaacatg

SEQ ID NO: 412959 - DNA, 20 bp, Artificial Sequence
  Description of Artificial Sequence: Synthetic oligonucleotide
  Target: LAMA2; (+) strand; PAM type: YTN; PAM sequence: CTT
atgataccaacatggggccc

SEQ ID NO: 412960 - DNA, 20 bp, Artificial Sequence
  Description of Artificial Sequence: Synthetic oligonucleotide
  Target: LAMA2; (+) strand; PAM type: YTN; PAM sequence: TTA
tgataccaacatggggccca

SEQ ID NO: 412961 - DNA, 20 bp, Artificial Sequence
  Description of Artificial Sequence: Synthetic oligonucleotide
  Target: LAMA2; (+) strand; PAM type: YTN; PAM sequence: CTC
tgtcaaaccaatggagacat

SEQ ID NO: 412962 - DNA, 20 bp, Artificial Sequence
  Description of Artificial Sequence: Synthetic oligonucleotide
  Target: LAMA2; (+) strand; PAM type: YTN; PAM sequence: CTG
tcaaaccaatggagacatag

SEQ ID NO: 412963 - DNA, 20 bp, Artificial Sequence
  Description of Artificial Sequence: Synthetic oligonucleotide
  Target: LAMA2; (+) strand; PAM type: YTN; PAM sequence: TTT
agactatgagaacagtcata

SEQ ID NO: 412964 - DNA, 20 bp, Artificial Sequence
  Description of Artificial Sequence: Synthetic oligonucleotide
  Target: LAMA2; (+) strand; PAM type: YTN; PAM sequence: TTA
gactatgagaacagtcatat

SEQ ID NO: 412965 - DNA, 20 bp, Artificial Sequence
  Description of Artificial Sequence: Synthetic oligonucleotide
  Target: LAMA2; (+) strand; PAM type: YTN; PAM sequence: CTA
tgagaacagtcatattccag

SEQ ID NO: 412966 - DNA, 20 bp, Artificial Sequence
  Description of Artificial Sequence: Synthetic oligonucleotide
  Target: LAMA2; (+) strand; PAM type: YTN; PAM sequence: TTC
caggatagacacatccaagt

SEQ ID NO: 412967 - DNA, 20 bp, Artificial Sequence
  Description of Artificial Sequence: Synthetic oligonucleotide
  Target: LAMA2; (+) strand; PAM type: YTN; PAM sequence: TTG
agaagcacaacacaggattt

SEQ ID NO: 412968 - DNA, 20 bp, Artificial Sequence
  Description of Artificial Sequence: Synthetic oligonucleotide
  Target: LAMA2; (+) strand; PAM type: YTN; PAM sequence: TTT
tctgcatccatgccaggagg

SEQ ID NO: 412969 - DNA, 20 bp, Artificial Sequence
  Description of Artificial Sequence: Synthetic oligonucleotide
  Target: LAMA2; (+) strand; PAM type: YTN; PAM sequence: TTT
ctgcatccatgccaggaggc

SEQ ID NO: 412970 - DNA, 20 bp, Artificial Sequence
  Description of Artificial Sequence: Synthetic oligonucleotide
  Target: LAMA2; (+) strand; PAM type: YTN; PAM sequence: TTC
tgcatccatgccaggaggcc

SEQ ID NO: 412971 - DNA, 20 bp, Artificial Sequence
  Description of Artificial Sequence: Synthetic oligonucleotide
  Target: LAMA2; (+) strand; PAM type: YTN; PAM sequence: CTG
catccatgccaggaggcctg

SEQ ID NO: 412972 - DNA, 20 bp, Artificial Sequence
  Description of Artificial Sequence: Synthetic oligonucleotide
  Target: LAMA2; (+) strand; PAM type: YTN; PAM sequence: CTG
gtggtaacagagaacccagg

SEQ ID NO: 412973 - DNA, 20 bp, Artificial Sequence
  Description of Artificial Sequence: Synthetic oligonucleotide
  Target: LAMA2; (+) strand; PAM type: YTN; PAM sequence: CTT
tgggggatatcccatcctaa

SEQ ID NO: 412974 - DNA, 20 bp, Artificial Sequence
  Description of Artificial Sequence: Synthetic oligonucleotide
  Target: LAMA2; (+) strand; PAM type: YTN; PAM sequence: TTT
gggggatatcccatcctaag

SEQ ID NO: 412975 - DNA, 20 bp, Artificial Sequence
  Description of Artificial Sequence: Synthetic oligonucleotide
  Target: LAMA2; (+) strand; PAM type: YTN; PAM sequence: TTG
ggggatatcccatcctaaga

SEQ ID NO: 412976 - DNA, 20 bp, Artificial Sequence
  Description of Artificial Sequence: Synthetic oligonucleotide
  Target: LAMA2; (+) strand; PAM type: YTN; PAM sequence: CTA
agacaactggataactacac

SEQ ID NO: 412977 - DNA, 20 bp, Artificial Sequence
  Description of Artificial Sequence: Synthetic oligonucleotide
  Target: LAMA2; (+) strand; PAM type: YTN; PAM sequence: CTG
gataactacacacatagagc

SEQ ID NO: 412978 - DNA, 20 bp, Artificial Sequence
  Description of Artificial Sequence: Synthetic oligonucleotide
  Target: LAMA2; (+) strand; PAM type: YTN; PAM sequence: CTA
cacacatagagcaccctgca

SEQ ID NO: 412979 - DNA, 20 bp, Artificial Sequence
  Description of Artificial Sequence: Synthetic oligonucleotide
  Target: LAMA2; (+) strand; PAM type: YTN; PAM sequence: CTG
caaatgactgtattctacat

SEQ ID NO: 412980 - DNA, 20 bp, Artificial Sequence
  Description of Artificial Sequence: Synthetic oligonucleotide
  Target: LAMA2; (+) strand; PAM type: YTN; PAM sequence: CTG
tattctacataaaggcaaag

SEQ ID NO: 412981 - DNA, 20 bp, Artificial Sequence
  Description of Artificial Sequence: Synthetic oligonucleotide
  Target: LAMA2; (+) strand; PAM type: YTN; PAM sequence: TTC
tacataaaggcaaagttctg

SEQ ID NO: 412982 - DNA, 20 bp, Artificial Sequence
  Description of Artificial Sequence: Synthetic oligonucleotide
  Target: LAMA2; (+) strand; PAM type: YTN; PAM sequence: CTA
cataaaggcaaagttctgct

SEQ ID NO: 412983 - DNA, 20 bp, Artificial Sequence
  Description of Artificial Sequence: Synthetic oligonucleotide
  Target: LAMA2; (+) strand; PAM type: YTN; PAM sequence: TTC
tgctaaaacctgacatttgt

SEQ ID NO: 412984 - DNA, 20 bp, Artificial Sequence
  Description of Artificial Sequence: Synthetic oligonucleotide
  Target: LAMA2; (+) strand; PAM type: YTN; PAM sequence: CTG
ctaaaacctgacatttgttt

SEQ ID NO: 412985 - DNA, 20 bp, Artificial Sequence
  Description of Artificial Sequence: Synthetic oligonucleotide
  Target: LAMA2; (+) strand; PAM type: YTN; PAM sequence: CTA
aaacctgacatttgtttctt

SEQ ID NO: 412986 - DNA, 20 bp, Artificial Sequence
  Description of Artificial Sequence: Synthetic oligonucleotide
  Target: LAMA2; (+) strand; PAM type: YTN; PAM sequence: CTG
acatttgtttcttctgatct

SEQ ID NO: 412987 - DNA, 20 bp, Artificial Sequence
  Description of Artificial Sequence: Synthetic oligonucleotide
  Target: LAMA2; (+) strand; PAM type: YTN; PAM sequence: TTT
gtttcttctgatctgaatgt

SEQ ID NO: 412988 - DNA, 20 bp, Artificial Sequence
  Description of Artificial Sequence: Synthetic oligonucleotide
  Target: LAMA2; (+) strand; PAM type: YTN; PAM sequence: TTG
tttcttctgatctgaatgtt

SEQ ID NO: 412989 - DNA, 20 bp, Artificial Sequence
  Description of Artificial Sequence: Synthetic oligonucleotide
  Target: LAMA2; (+) strand; PAM type: YTN; PAM sequence: TTT
cttctgatctgaatgtttag

SEQ ID NO: 412990 - DNA, 20 bp, Artificial Sequence
  Description of Artificial Sequence: Synthetic oligonucleotide
  Target: LAMA2; (+) strand; PAM type: YTN; PAM sequence: TTC
ttctgatctgaatgtttagg

SEQ ID NO: 412991 - DNA, 20 bp, Artificial Sequence
  Description of Artificial Sequence: Synthetic oligonucleotide
  Target: LAMA2; (+) strand; PAM type: YTN; PAM sequence: CTT
ctgatctgaatgtttaggtg

SEQ ID NO: 412992 - DNA, 20 bp, Artificial Sequence
  Description of Artificial Sequence: Synthetic oligonucleotide
  Target: LAMA2; (+) strand; PAM type: YTN; PAM sequence: TTC
tgatctgaatgtttaggtga

SEQ ID NO: 412993 - DNA, 20 bp, Artificial Sequence
  Description of Artificial Sequence: Synthetic oligonucleotide
  Target: LAMA2; (+) strand; PAM type: YTN; PAM sequence: CTG
atctgaatgtttaggtgacc

SEQ ID NO: 412994 - DNA, 20 bp, Artificial Sequence
  Description of Artificial Sequence: Synthetic oligonucleotide
  Target: LAMA2; (+) strand; PAM type: YTN; PAM sequence: CTG
aatgtttaggtgacctatag

SEQ ID NO: 412995 - DNA, 20 bp, Artificial Sequence
  Description of Artificial Sequence: Synthetic oligonucleotide
  Target: LAMA2; (+) strand; PAM type: YTN; PAM sequence: TTT
aggtgacctatagcattgat

SEQ ID NO: 412996 - DNA, 20 bp, Artificial Sequence
  Description of Artificial Sequence: Synthetic oligonucleotide
  Target: LAMA2; (+) strand; PAM type: YTN; PAM sequence: TTA
ggtgacctatagcattgatg

SEQ ID NO: 412997 - DNA, 20 bp, Artificial Sequence
  Description of Artificial Sequence: Synthetic oligonucleotide
  Target: LAMA2; (+) strand; PAM type: YTN; PAM sequence: CTA
tagcattgatggctgcgtca

SEQ ID NO: 412998 - DNA, 20 bp, Artificial Sequence
  Description of Artificial Sequence: Synthetic oligonucleotide
  Target: LAMA2; (+) strand; PAM type: YTN; PAM sequence: TTG
atggctgcgtcaggaatctc

SEQ ID NO: 412999 - DNA, 20 bp, Artificial Sequence
  Description of Artificial Sequence: Synthetic oligonucleotide
  Target: LAMA2; (+) strand; PAM type: YTN; PAM sequence: CTG
cgtcaggaatctccacatgg

SEQ ID NO: 413000 - DNA, 20 bp, Artificial Sequence
  Description of Artificial Sequence: Synthetic oligonucleotide
  Target: LAMA2; (+) strand; PAM type: YTN; PAM sequence: CTC
cacatggcagaggcccctgc

SEQ ID NO: 413001 - DNA, 20 bp, Artificial Sequence
  Description of Artificial Sequence: Synthetic oligonucleotide
  Target: LAMA2; (+) strand; PAM type: YTN; PAM sequence: CTG
ccgatctggaacaacccacc

SEQ ID NO: 413002 - DNA, 20 bp, Artificial Sequence
  Description of Artificial Sequence: Synthetic oligonucleotide
  Target: LAMA2; (+) strand; PAM type: YTN; PAM sequence: CTG
gaacaacccacctccagctt

SEQ ID NO: 413003 - DNA, 20 bp, Artificial Sequence
  Description of Artificial Sequence: Synthetic oligonucleotide
  Target: LAMA2; (+) strand; PAM type: YTN; PAM sequence: CTC
cagcttccatgttgggacat

SEQ ID NO: 413004 - DNA, 20 bp, Artificial Sequence
  Description of Artificial Sequence: Synthetic oligonucleotide
  Target: LAMA2; (+) strand; PAM type: YTN; PAM sequence: CTT
ccatgttgggacatgttttg

SEQ ID NO: 413005 - DNA, 20 bp, Artificial Sequence
  Description of Artificial Sequence: Synthetic oligonucleotide
  Target: LAMA2; (+) strand; PAM type: YTN; PAM sequence: TTC
catgttgggacatgttttgc

SEQ ID NO: 413006 - DNA, 20 bp, Artificial Sequence
  Description of Artificial Sequence: Synthetic oligonucleotide
  Target: LAMA2; (+) strand; PAM type: YTN; PAM sequence: TTG
ggacatgttttgcaaatgct

SEQ ID NO: 413007 - DNA, 20 bp, Artificial Sequence
  Description of Artificial Sequence: Synthetic oligonucleotide
  Target: LAMA2; (+) strand; PAM type: YTN; PAM sequence: TTT
tgcaaatgctcagaggggaa

SEQ ID NO: 413008 - DNA, 20 bp, Artificial Sequence
  Description of Artificial Sequence: Synthetic oligonucleotide
  Target: LAMA2; (+) strand; PAM type: YTN; PAM sequence: TTT
gcaaatgctcagaggggaac

SEQ ID NO: 413009 - DNA, 20 bp, Artificial Sequence
  Description of Artificial Sequence: Synthetic oligonucleotide
  Target: LAMA2; (+) strand; PAM type: YTN; PAM sequence: TTG
caaatgctcagaggggaaca

SEQ ID NO: 413010 - DNA, 20 bp, Artificial Sequence
  Description of Artificial Sequence: Synthetic oligonucleotide
  Target: LAMA2; (+) strand; PAM type: YTN; PAM sequence: CTC
agaggggaacatattttgac

SEQ ID NO: 413011 - DNA, 20 bp, Artificial Sequence
  Description of Artificial Sequence: Synthetic oligonucleotide
  Target: LAMA2; (+) strand; PAM type: YTN; PAM sequence: TTT
tgacggaaccggttttgcca

SEQ ID NO: 413012 - DNA, 20 bp, Artificial Sequence
  Description of Artificial Sequence: Synthetic oligonucleotide
  Target: LAMA2; (+) strand; PAM type: YTN; PAM sequence: TTT
gacggaaccggttttgccaa

SEQ ID NO: 413013 - DNA, 20 bp, Artificial Sequence
  Description of Artificial Sequence: Synthetic oligonucleotide
  Target: LAMA2; (+) strand; PAM type: YTN; PAM sequence: TTG
acggaaccggttttgccaaa

SEQ ID NO: 413014 - DNA, 20 bp, Artificial Sequence
  Description of Artificial Sequence: Synthetic oligonucleotide
  Target: LAMA2; (+) strand; PAM type: YTN; PAM sequence: TTT
tgccaaagcaggtaaggctc

SEQ ID NO: 413015 - DNA, 20 bp, Artificial Sequence
  Description of Artificial Sequence: Synthetic oligonucleotide
  Target: LAMA2; (+) strand; PAM type: YTN; PAM sequence: TTT
gccaaagcaggtaaggctct

SEQ ID NO: 413016 - DNA, 20 bp, Artificial Sequence
  Description of Artificial Sequence: Synthetic oligonucleotide
  Target: LAMA2; (+) strand; PAM type: YTN; PAM sequence: TTG
ccaaagcaggtaaggctctt

SEQ ID NO: 413017 - DNA, 20 bp, Artificial Sequence
  Description of Artificial Sequence: Synthetic oligonucleotide
  Target: LAMA2; (+) strand; PAM type: YTN; PAM sequence: CTC
tttcatttccttcctgttga

SEQ ID NO: 413018 - DNA, 20 bp, Artificial Sequence
  Description of Artificial Sequence: Synthetic oligonucleotide
  Target: LAMA2; (+) strand; PAM type: YTN; PAM sequence: CTT
tcatttccttcctgttgatt

SEQ ID NO: 413019 - DNA, 20 bp, Artificial Sequence
  Description of Artificial Sequence: Synthetic oligonucleotide
  Target: LAMA2; (+) strand; PAM type: YTN; PAM sequence: TTT
catttccttcctgttgatta

SEQ ID NO: 413020 - DNA, 20 bp, Artificial Sequence
  Description of Artificial Sequence: Synthetic oligonucleotide
  Target: LAMA2; (+) strand; PAM type: YTN; PAM sequence: TTC
atttccttcctgttgattat

SEQ ID NO: 413021 - DNA, 20 bp, Artificial Sequence
  Description of Artificial Sequence: Synthetic oligonucleotide
  Target: LAMA2; (+) strand; PAM type: YTN; PAM sequence: TTT
ccttcctgttgattattaac

SEQ ID NO: 413022 - DNA, 20 bp, Artificial Sequence
  Description of Artificial Sequence: Synthetic oligonucleotide
  Target: LAMA2; (+) strand; PAM type: YTN; PAM sequence: TTC
cttcctgttgattattaact

SEQ ID NO: 413023 - DNA, 20 bp, Artificial Sequence
  Description of Artificial Sequence: Synthetic oligonucleotide
  Target: LAMA2; (+) strand; PAM type: YTN; PAM sequence: CTT
cctgttgattattaactaga

SEQ ID NO: 413024 - DNA, 20 bp, Artificial Sequence
  Description of Artificial Sequence: Synthetic oligonucleotide
  Target: LAMA2; (+) strand; PAM type: YTN; PAM sequence: TTC
ctgttgattattaactagat

SEQ ID NO: 413025 - DNA, 20 bp, Artificial Sequence
  Description of Artificial Sequence: Synthetic oligonucleotide
  Target: LAMA2; (+) strand; PAM type: YTN; PAM sequence: CTG
ttgattattaactagataca

SEQ ID NO: 413026 - DNA, 20 bp, Artificial Sequence
  Description of Artificial Sequence: Synthetic oligonucleotide
  Target: LAMA2; (+) strand; PAM type: YTN; PAM sequence: TTG
attattaactagatacaaat

SEQ ID NO: 413027 - DNA, 20 bp, Artificial Sequence
  Description of Artificial Sequence: Synthetic oligonucleotide
  Target: LAMA2; (+) strand; PAM type: YTN; PAM sequence: TTA
ttaactagatacaaatacta

SEQ ID NO: 413028 - DNA, 20 bp, Artificial Sequence
  Description of Artificial Sequence: Synthetic oligonucleotide
  Target: LAMA2; (+) strand; PAM type: YTN; PAM sequence: TTA
actagatacaaatactaact

SEQ ID NO: 413029 - DNA, 20 bp, Artificial Sequence
  Description of Artificial Sequence: Synthetic oligonucleotide
  Target: LAMA2; (+) strand; PAM type: YTN; PAM sequence: CTA
gatacaaatactaacttctt

SEQ ID NO: 413030 - DNA, 20 bp, Artificial Sequence
  Description of Artificial Sequence: Synthetic oligonucleotide
  Target: LAMA2; (+) strand; PAM type: YTN; PAM sequence: CTA
acttcttgctagtaccaaat

SEQ ID NO: 413031 - DNA, 20 bp, Artificial Sequence
  Description of Artificial Sequence: Synthetic oligonucleotide
  Target: LAMA2; (+) strand; PAM type: YTN; PAM sequence: CTT
cttgctagtaccaaataata

SEQ ID NO: 413032 - DNA, 20 bp, Artificial Sequence
  Description of Artificial Sequence: Synthetic oligonucleotide
  Target: LAMA2; (+) strand; PAM type: YTN; PAM sequence: TTC
ttgctagtaccaaataataa

SEQ ID NO: 413033 - DNA, 20 bp, Artificial Sequence
  Description of Artificial Sequence: Synthetic oligonucleotide
  Target: LAMA2; (+) strand; PAM type: YTN; PAM sequence: CTT
gctagtaccaaataataaaa

SEQ ID NO: 413034 - DNA, 20 bp, Artificial Sequence
  Description of Artificial Sequence: Synthetic oligonucleotide
  Target: LAMA2; (+) strand; PAM type: YTN; PAM sequence: TTG
ctagtaccaaataataaaag

SEQ ID NO: 413035 - DNA, 20 bp, Artificial Sequence
  Description of Artificial Sequence: Synthetic oligonucleotide
  Target: LAMA2; (+) strand; PAM type: YTN; PAM sequence: CTA
gtaccaaataataaaagttc

SEQ ID NO: 413036 - DNA, 20 bp, Artificial Sequence
  Description of Artificial Sequence: Synthetic oligonucleotide
  Target: LAMA2; (+) strand; PAM type: YTN; PAM sequence: TTC
ctagagtcctaaactagtat

SEQ ID NO: 413037 - DNA, 20 bp, Artificial Sequence
  Description of Artificial Sequence: Synthetic oligonucleotide
  Target: LAMA2; (+) strand; PAM type: YTN; PAM sequence: CTA
gagtcctaaactagtatcct

SEQ ID NO: 413038 - DNA, 20 bp, Artificial Sequence
  Description of Artificial Sequence: Synthetic oligonucleotide
  Target: LAMA2; (+) strand; PAM type: YTN; PAM sequence: CTA
aactagtatcctttatttaa

SEQ ID NO: 413039 - DNA, 20 bp, Artificial Sequence
  Description of Artificial Sequence: Synthetic oligonucleotide
  Target: LAMA2; (+) strand; PAM type: YTN; PAM sequence: CTA
gtatcctttatttaagccaa

SEQ ID NO: 413040 - DNA, 20 bp, Artificial Sequence
  Description of Artificial Sequence: Synthetic oligonucleotide
  Target: LAMA2; (+) strand; PAM type: YTN; PAM sequence: CTT
tatttaagccaaaaagaaac

SEQ ID NO: 413041 - DNA, 20 bp, Artificial Sequence
  Description of Artificial Sequence: Synthetic oligonucleotide
  Target: LAMA2; (+) strand; PAM type: YTN; PAM sequence: TTT
atttaagccaaaaagaaact

SEQ ID NO: 413042 - DNA, 20 bp, Artificial Sequence
  Description of Artificial Sequence: Synthetic oligonucleotide
  Target: LAMA2; (+) strand; PAM type: YTN; PAM sequence: TTA
tttaagccaaaaagaaactt

SEQ ID NO: 413043 - DNA, 20 bp, Artificial Sequence
  Description of Artificial Sequence: Synthetic oligonucleotide
  Target: LAMA2; (+) strand; PAM type: YTN; PAM sequence: TTT
aagccaaaaagaaacttatg

SEQ ID NO: 413044 - DNA, 20 bp, Artificial Sequence
  Description of Artificial Sequence: Synthetic oligonucleotide
  Target: LAMA2; (+) strand; PAM type: YTN; PAM sequence: TTA
agccaaaaagaaacttatgg

SEQ ID NO: 413045 - DNA, 20 bp, Artificial Sequence
  Description of Artificial Sequence: Synthetic oligonucleotide
  Target: LAMA2; (+) strand; PAM type: YTN; PAM sequence: CTT
atggaagtaatttcaaaaat

SEQ ID NO: 413046 - DNA, 20 bp, Artificial Sequence
  Description of Artificial Sequence: Synthetic oligonucleotide
  Target: LAMA2; (+) strand; PAM type: YTN; PAM sequence: TTA
tggaagtaatttcaaaaatg

SEQ ID NO: 413047 - DNA, 20 bp, Artificial Sequence
  Description of Artificial Sequence: Synthetic oligonucleotide
  Target: LAMA2; (+) strand; PAM type: YTN; PAM sequence: TTT
caaaaatgcctcttaaaaat

SEQ ID NO: 413048 - DNA, 20 bp, Artificial Sequence
  Description of Artificial Sequence: Synthetic oligonucleotide
  Target: LAMA2; (+) strand; PAM type: YTN; PAM sequence: TTC
aaaaatgcctcttaaaaatt

SEQ ID NO: 413049 - DNA, 20 bp, Artificial Sequence
  Description of Artificial Sequence: Synthetic oligonucleotide
  Target: LAMA2; (+) strand; PAM type: YTN; PAM sequence: CTC
ttaaaaattcatgtatctga

SEQ ID NO: 413050 - DNA, 20 bp, Artificial Sequence
  Description of Artificial Sequence: Synthetic oligonucleotide
  Target: LAMA2; (+) strand; PAM type: YTN; PAM sequence: CTT
aaaaattcatgtatctgatc

SEQ ID NO: 413051 - DNA, 20 bp, Artificial Sequence
  Description of Artificial Sequence: Synthetic oligonucleotide
  Target: LAMA2; (+) strand; PAM type: YTN; PAM sequence: TTA
aaaattcatgtatctgatcc

SEQ ID NO: 413052 - DNA, 20 bp, Artificial Sequence
  Description of Artificial Sequence: Synthetic oligonucleotide
  Target: LAMA2; (+) strand; PAM type: YTN; PAM sequence: TTC
atgtatctgatcctgataag

SEQ ID NO: 413053 - DNA, 20 bp, Artificial Sequence
  Description of Artificial Sequence: Synthetic oligonucleotide
  Target: LAMA2; (+) strand; PAM type: YTN; PAM sequence: CTG
atcctgataagaattaatag

SEQ ID NO: 413054 - DNA, 20 bp, Artificial Sequence
  Description of Artificial Sequence: Synthetic oligonucleotide
  Target: LAMA2; (+) strand; PAM type: YTN; PAM sequence: CTG
ataagaattaatagaagaaa

SEQ ID NO: 413055 - DNA, 20 bp, Artificial Sequence
  Description of Artificial Sequence: Synthetic oligonucleotide
  Target: LAMA2; (+) strand; PAM type: YTN; PAM sequence: TTA
atagaagaaataaagtaaaa

SEQ ID NO: 413056 - DNA, 20 bp, Artificial Sequence
  Description of Artificial Sequence: Synthetic oligonucleotide
  Target: LAMA2; (+) strand; PAM type: YTN; PAM sequence: CTA
tttagagaatttattccatc

SEQ ID NO: 413057 - DNA, 20 bp, Artificial Sequence
  Description of Artificial Sequence: Synthetic oligonucleotide
  Target: LAMA2; (+) strand; PAM type: YTN; PAM sequence: TTT
agagaatttattccatctcc

SEQ ID NO: 413058 - DNA, 20 bp, Artificial Sequence
  Description of Artificial Sequence: Synthetic oligonucleotide
  Target: LAMA2; (+) strand; PAM type: YTN; PAM sequence: TTA
gagaatttattccatctcct

SEQ ID NO: 413059 - DNA, 20 bp, Artificial Sequence
  Description of Artificial Sequence: Synthetic oligonucleotide
  Target: LAMA2; (+) strand; PAM type: YTN; PAM sequence: TTT
attccatctccttcactgga

SEQ ID NO: 413060 - DNA, 20 bp, Artificial Sequence
  Description of Artificial Sequence: Synthetic oligonucleotide
  Target: LAMA2; (+) strand; PAM type: YTN; PAM sequence: TTA
ttccatctccttcactggag

SEQ ID NO: 413061 - DNA, 20 bp, Artificial Sequence
  Description of Artificial Sequence: Synthetic oligonucleotide
  Target: LAMA2; (+) strand; PAM type: YTN; PAM sequence: TTC
catctccttcactggaggtt

SEQ ID NO: 413062 - DNA, 20 bp, Artificial Sequence
  Description of Artificial Sequence: Synthetic oligonucleotide
  Target: LAMA2; (+) strand; PAM type: YTN; PAM sequence: CTC
cttcactggaggttaagaac

SEQ ID NO: 413063 - DNA, 20 bp, Artificial Sequence
  Description of Artificial Sequence: Synthetic oligonucleotide
  Target: LAMA2; (+) strand; PAM type: YTN; PAM sequence: CTT
cactggaggttaagaacagc

SEQ ID NO: 413064 - DNA, 20 bp, Artificial Sequence
  Description of Artificial Sequence: Synthetic oligonucleotide
  Target: LAMA2; (+) strand; PAM type: YTN; PAM sequence: TTC
actggaggttaagaacagca

SEQ ID NO: 413065 - DNA, 20 bp, Artificial Sequence
  Description of Artificial Sequence: Synthetic oligonucleotide
  Target: LAMA2; (+) strand; PAM type: YTN; PAM sequence: CTG
gaggttaagaacagcaaaat

SEQ ID NO: 413066 - DNA, 20 bp, Artificial Sequence
  Description of Artificial Sequence: Synthetic oligonucleotide
  Target: LAMA2; (+) strand; PAM type: YTN; PAM sequence: TTA
agaacagcaaaataaataat

SEQ ID NO: 413067 - DNA, 20 bp, Artificial Sequence
  Description of Artificial Sequence: Synthetic oligonucleotide
  Target: LAMA2; (+) strand; PAM type: YTN; PAM sequence: TTT
tgcaagaacactcatatgtt

SEQ ID NO: 413068 - DNA, 20 bp, Artificial Sequence
  Description of Artificial Sequence: Synthetic oligonucleotide
  Target: LAMA2; (+) strand; PAM type: YTN; PAM sequence: TTT
gcaagaacactcatatgttt

SEQ ID NO: 413069 - DNA, 20 bp, Artificial Sequence
  Description of Artificial Sequence: Synthetic oligonucleotide
  Target: LAMA2; (+) strand; PAM type: YTN; PAM sequence: TTG
caagaacactcatatgttta

SEQ ID NO: 413070 - DNA, 20 bp, Artificial Sequence
  Description of Artificial Sequence: Synthetic oligonucleotide
  Target: LAMA2; (+) strand; PAM type: YTN; PAM sequence: CTC
atatgtttatactatgttgt

SEQ ID NO: 413071 - DNA, 20 bp, Artificial Sequence
  Description of Artificial Sequence: Synthetic oligonucleotide
  Target: LAMA2; (+) strand; PAM type: YTN; PAM sequence: TTT
atactatgttgtttttctac

SEQ ID NO: 413072 - DNA, 20 bp, Artificial Sequence
  Description of Artificial Sequence: Synthetic oligonucleotide
  Target: LAMA2; (+) strand; PAM type: YTN; PAM sequence: TTA
tactatgttgtttttctacc

SEQ ID NO: 413073 - DNA, 20 bp, Artificial Sequence
  Description of Artificial Sequence: Synthetic oligonucleotide
  Target: LAMA2; (+) strand; PAM type: YTN; PAM sequence: CTA
tgttgtttttctaccttcca

SEQ ID NO: 413074 - DNA, 20 bp, Artificial Sequence
  Description of Artificial Sequence: Synthetic oligonucleotide
  Target: LAMA2; (+) strand; PAM type: YTN; PAM sequence: TTG
tttttctaccttccagtttc

SEQ ID NO: 413075 - DNA, 20 bp, Artificial Sequence
  Description of Artificial Sequence: Synthetic oligonucleotide
  Target: LAMA2; (+) strand; PAM type: YTN; PAM sequence: TTT
ttctaccttccagtttctgg

SEQ ID NO: 413076 - DNA, 20 bp, Artificial Sequence
  Description of Artificial Sequence: Synthetic oligonucleotide
  Target: LAMA2; (+) strand; PAM type: YTN; PAM sequence: TTT
tctaccttccagtttctgga

SEQ ID NO: 413077 - DNA, 20 bp, Artificial Sequence
  Description of Artificial Sequence: Synthetic oligonucleotide
  Target: LAMA2; (+) strand; PAM type: YTN; PAM sequence: TTT
ctaccttccagtttctggag

SEQ ID NO: 413078 - DNA, 20 bp, Artificial Sequence
  Description of Artificial Sequence: Synthetic oligonucleotide
  Target: LAMA2; (+) strand; PAM type: YTN; PAM sequence: TTC
taccttccagtttctggaga

SEQ ID NO: 413079 - DNA, 20 bp, Artificial Sequence
  Description of Artificial Sequence: Synthetic oligonucleotide
  Target: LAMA2; (+) strand; PAM type: YTN; PAM sequence: CTA
ccttccagtttctggagatg

SEQ ID NO: 413080 - DNA, 20 bp, Artificial Sequence
  Description of Artificial Sequence: Synthetic oligonucleotide
  Target: LAMA2; (+) strand; PAM type: YTN; PAM sequence: CTT
ccagtttctggagatgagat

SEQ ID NO: 413081 - DNA, 20 bp, Artificial Sequence
  Description of Artificial Sequence: Synthetic oligonucleotide
  Target: LAMA2; (+) strand; PAM type: YTN; PAM sequence: TTC
cagtttctggagatgagata

SEQ ID NO: 413082 - DNA, 20 bp, Artificial Sequence
  Description of Artificial Sequence: Synthetic oligonucleotide
  Target: LAMA2; (+) strand; PAM type: YTN; PAM sequence: TTT
ctggagatgagatatgattt

SEQ ID NO: 413083 - DNA, 20 bp, Artificial Sequence
  Description of Artificial Sequence: Synthetic oligonucleotide
  Target: LAMA2; (+) strand; PAM type: YTN; PAM sequence: TTC
tggagatgagatatgatttt

SEQ ID NO: 413084 - DNA, 20 bp, Artificial Sequence
  Description of Artificial Sequence: Synthetic oligonucleotide
  Target: LAMA2; (+) strand; PAM type: YTN; PAM sequence: CTG
gagatgagatatgatttttt

SEQ ID NO: 413085 - DNA, 20 bp, Artificial Sequence
  Description of Artificial Sequence: Synthetic oligonucleotide
  Target: LAMA2; (+) strand; PAM type: YTN; PAM sequence: TTT
ttttcttcaattccctgcaa

SEQ ID NO: 413086 - DNA, 20 bp, Artificial Sequence
  Description of Artificial Sequence: Synthetic oligonucleotide
  Target: LAMA2; (+) strand; PAM type: YTN; PAM sequence: TTT
tttcttcaattccctgcaag

SEQ ID NO: 413087 - DNA, 20 bp, Artificial Sequence
  Description of Artificial Sequence: Synthetic oligonucleotide
  Target: LAMA2; (+) strand; PAM type: YTN; PAM sequence: TTT
ttcttcaattccctgcaagg

SEQ ID NO: 413088 - DNA, 20 bp, Artificial Sequence
  Description of Artificial Sequence: Synthetic oligonucleotide
  Target: LAMA2; (+) strand; PAM type: YTN; PAM sequence: TTT
tcttcaattccctgcaaggc

SEQ ID NO: 413089 - DNA, 20 bp, Artificial Sequence
  Description of Artificial Sequence: Synthetic oligonucleotide
  Target: LAMA2; (+) strand; PAM type: YTN; PAM sequence: TTT
cttcaattccctgcaaggct

SEQ ID NO: 413090 - DNA, 20 bp, Artificial Sequence
  Description of Artificial Sequence: Synthetic oligonucleotide
  Target: LAMA2; (+) strand; PAM type: YTN; PAM sequence: TTC
ttcaattccctgcaaggctg

SEQ ID NO: 413091 - DNA, 20 bp, Artificial Sequence
  Description of Artificial Sequence: Synthetic oligonucleotide
  Target: LAMA2; (+) strand; PAM type: YTN; PAM sequence: CTT
caattccctgcaaggctgta

SEQ ID NO: 413092 - DNA, 20 bp, Artificial Sequence
  Description of Artificial Sequence: Synthetic oligonucleotide
  Target: LAMA2; (+) strand; PAM type: YTN; PAM sequence: TTC
aattccctgcaaggctgtat

SEQ ID NO: 413093 - DNA, 20 bp, Artificial Sequence
  Description of Artificial Sequence: Synthetic oligonucleotide
  Target: LAMA2; (+) strand; PAM type: YTN; PAM sequence: TTC
cctgcaaggctgtatttcat

SEQ ID NO: 413094 - DNA, 20 bp, Artificial Sequence
  Description of Artificial Sequence: Synthetic oligonucleotide
  Target: LAMA2; (+) strand; PAM type: YTN; PAM sequence: CTG
caaggctgtatttcataatc

SEQ ID NO: 413095 - DNA, 20 bp, Artificial Sequence
  Description of Artificial Sequence: Synthetic oligonucleotide
  Target: LAMA2; (+) strand; PAM type: YTN; PAM sequence: CTG
tatttcataatctcctcccc

SEQ ID NO: 413096 - DNA, 20 bp, Artificial Sequence
  Description of Artificial Sequence: Synthetic oligonucleotide
  Target: LAMA2; (+) strand; PAM type: YTN; PAM sequence: TTT
cataatctcctccccatcaa

SEQ ID NO: 413097 - DNA, 20 bp, Artificial Sequence
  Description of Artificial Sequence: Synthetic oligonucleotide
  Target: LAMA2; (+) strand; PAM type: YTN; PAM sequence: TTC
ataatctcctccccatcaac

SEQ ID NO: 413098 - DNA, 20 bp, Artificial Sequence
  Description of Artificial Sequence: Synthetic oligonucleotide
  Target: LAMA2; (+) strand; PAM type: YTN; PAM sequence: CTC
ctccccatcaacacacaccc

SEQ ID NO: 413099 - DNA, 20 bp, Artificial Sequence
  Description of Artificial Sequence: Synthetic oligonucleotide
  Target: LAMA2; (+) strand; PAM type: YTN; PAM sequence: CTC
cccatcaacacacacccata

SEQ ID NO: 413100 - DNA, 20 bp, Artificial Sequence
  Description of Artificial Sequence: Synthetic oligonucleotide
  Target: LAMA2; (+) strand; PAM type: YTN; PAM sequence: CTG
tttcttgttgatagtgacaa

SEQ ID NO: 413101 - DNA, 20 bp, Artificial Sequence
  Description of Artificial Sequence: Synthetic oligonucleotide
  Target: LAMA2; (+) strand; PAM type: YTN; PAM sequence: TTT
cttgttgatagtgacaatga

SEQ ID NO: 413102 - DNA, 20 bp, Artificial Sequence
  Description of Artificial Sequence: Synthetic oligonucleotide
  Target: LAMA2; (+) strand; PAM type: YTN; PAM sequence: TTC
ttgttgatagtgacaatgac

SEQ ID NO: 413103 - DNA, 20 bp, Artificial Sequence
  Description of Artificial Sequence: Synthetic oligonucleotide
  Target: LAMA2; (+) strand; PAM type: YTN; PAM sequence: CTT
gttgatagtgacaatgactg

SEQ ID NO: 413104 - DNA, 20 bp, Artificial Sequence
  Description of Artificial Sequence: Synthetic oligonucleotide
  Target: LAMA2; (+) strand; PAM type: YTN; PAM sequence: TTG
ttgatagtgacaatgactgg

SEQ ID NO: 413105 - DNA, 20 bp, Artificial Sequence
  Description of Artificial Sequence: Synthetic oligonucleotide
  Target: LAMA2; (+) strand; PAM type: YTN; PAM sequence: TTG
atagtgacaatgactggcat

SEQ ID NO: 413106 - DNA, 20 bp, Artificial Sequence
  Description of Artificial Sequence: Synthetic oligonucleotide
  Target: LAMA2; (+) strand; PAM type: YTN; PAM sequence: CTG
gcatctttcctggctttctc

SEQ ID NO: 413107 - DNA, 20 bp, Artificial Sequence
  Description of Artificial Sequence: Synthetic oligonucleotide
  Target: LAMA2; (+) strand; PAM type: YTN; PAM sequence: CTT
tcctggctttctccactccg

SEQ ID NO: 413108 - DNA, 20 bp, Artificial Sequence
  Description of Artificial Sequence: Synthetic oligonucleotide
  Target: LAMA2; (+) strand; PAM type: YTN; PAM sequence: TTT
cctggctttctccactccgt

SEQ ID NO: 413109 - DNA, 20 bp, Artificial Sequence
  Description of Artificial Sequence: Synthetic oligonucleotide
  Target: LAMA2; (+) strand; PAM type: YTN; PAM sequence: TTC
ctggctttctccactccgtt

SEQ ID NO: 413110 - DNA, 20 bp, Artificial Sequence
  Description of Artificial Sequence: Synthetic oligonucleotide
  Target: LAMA2; (+) strand; PAM type: YTN; PAM sequence: CTG
gctttctccactccgtttct

SEQ ID NO: 413111 - DNA, 20 bp, Artificial Sequence
  Description of Artificial Sequence: Synthetic oligonucleotide
  Target: LAMA2; (+) strand; PAM type: YTN; PAM sequence: CTT
tctccactccgtttctaatg

SEQ ID NO: 413112 - DNA, 20 bp, Artificial Sequence
  Description of Artificial Sequence: Synthetic oligonucleotide
  Target: LAMA2; (+) strand; PAM type: YTN; PAM sequence: TTT
ctccactccgtttctaatga

SEQ ID NO: 413113 - DNA, 20 bp, Artificial Sequence
  Description of Artificial Sequence: Synthetic oligonucleotide
  Target: LAMA2; (+) strand; PAM type: YTN; PAM sequence: TTC
tccactccgtttctaatgaa

SEQ ID NO: 413114 - DNA, 20 bp, Artificial Sequence
  Description of Artificial Sequence: Synthetic oligonucleotide
  Target: LAMA2; (+) strand; PAM type: YTN; PAM sequence: CTC
cactccgtttctaatgaaca

SEQ ID NO: 413115 - DNA, 20 bp, Artificial Sequence
  Description of Artificial Sequence: Synthetic oligonucleotide
  Target: LAMA2; (+) strand; PAM type: YTN; PAM sequence: CTC
cgtttctaatgaacatttcc

SEQ ID NO: 413116 - DNA, 20 bp, Artificial Sequence
  Description of Artificial Sequence: Synthetic oligonucleotide
  Target: LAMA2; (+) strand; PAM type: YTN; PAM sequence: TTT
ctaatgaacatttccagtat

SEQ ID NO: 413117 - DNA, 20 bp, Artificial Sequence
  Description of Artificial Sequence: Synthetic oligonucleotide
  Target: LAMA2; (+) strand; PAM type: YTN; PAM sequence: TTC
taatgaacatttccagtatg

SEQ ID NO: 413118 - DNA, 20 bp, Artificial Sequence
  Description of Artificial Sequence: Synthetic oligonucleotide
  Target: LAMA2; (+) strand; PAM type: YTN; PAM sequence: CTA
atgaacatttccagtatggt

SEQ ID NO: 413119 - DNA, 20 bp, Artificial Sequence
  Description of Artificial Sequence: Synthetic oligonucleotide
  Target: LAMA2; (+) strand; PAM type: YTN; PAM sequence: TTT
ccagtatggttttatatcac

SEQ ID NO: 413120 - DNA, 20 bp, Artificial Sequence
  Description of Artificial Sequence: Synthetic oligonucleotide
  Target: LAMA2; (+) strand; PAM type: YTN; PAM sequence: TTC
cagtatggttttatatcact

SEQ ID NO: 413121 - DNA, 20 bp, Artificial Sequence
  Description of Artificial Sequence: Synthetic oligonucleotide
  Target: LAMA2; (+) strand; PAM type: YTN; PAM sequence: TTT
tatatcactggtcatgaagg

SEQ ID NO: 413122 - DNA, 20 bp, Artificial Sequence
  Description of Artificial Sequence: Synthetic oligonucleotide
  Target: LAMA2; (+) strand; PAM type: YTN; PAM sequence: TTT
atatcactggtcatgaaggt

SEQ ID NO: 413123 - DNA, 20 bp, Artificial Sequence
  Description of Artificial Sequence: Synthetic oligonucleotide
  Target: LAMA2; (+) strand; PAM type: YTN; PAM sequence: TTA
tatcactggtcatgaaggta

SEQ ID NO: 413124 - DNA, 20 bp, Artificial Sequence
  Description of Artificial Sequence: Synthetic oligonucleotide
  Target: LAMA2; (+) strand; PAM type: YTN; PAM sequence: CTG
gtcatgaaggtacagttagg

SEQ ID NO: 413125 - DNA, 20 bp, Artificial Sequence
  Description of Artificial Sequence: Synthetic oligonucleotide
  Target: LAMA2; (+) strand; PAM type: YTN; PAM sequence: TTA
ggaaaaagaaataggaaata

SEQ ID NO: 413126 - DNA, 20 bp, Artificial Sequence
  Description of Artificial Sequence: Synthetic oligonucleotide
  Target: LAMA2; (+) strand; PAM type: YTN; PAM sequence: CTC
tacataataattttttaatc

SEQ ID NO: 413127 - DNA, 20 bp, Artificial Sequence
  Description of Artificial Sequence: Synthetic oligonucleotide
  Target: LAMA2; (+) strand; PAM type: YTN; PAM sequence: CTA
cataataattttttaatcct

SEQ ID NO: 413128 - DNA, 20 bp, Artificial Sequence
  Description of Artificial Sequence: Synthetic oligonucleotide
  Target: LAMA2; (+) strand; PAM type: YTN; PAM sequence: TTT
tttaatcctttaatttttaa

SEQ ID NO: 413129 - DNA, 20 bp, Artificial Sequence
  Description of Artificial Sequence: Synthetic oligonucleotide
  Target: LAMA2; (+) strand; PAM type: YTN; PAM sequence: TTT
ttaatcctttaatttttaat

SEQ ID NO: 413130 - DNA, 20 bp, Artificial Sequence
  Description of Artificial Sequence: Synthetic oligonucleotide
  Target: LAMA2; (+) strand; PAM type: YTN; PAM sequence: TTT
taatcctttaatttttaatt

SEQ ID NO: 413131 - DNA, 20 bp, Artificial Sequence
  Description of Artificial Sequence: Synthetic oligonucleotide
  Target: LAMA2; (+) strand; PAM type: YTN; PAM sequence: TTT
aatcctttaatttttaattt

SEQ ID NO: 413132 - DNA, 20 bp, Artificial Sequence
  Description of Artificial Sequence: Synthetic oligonucleotide
  Target: LAMA2; (+) strand; PAM type: YTN; PAM sequence: TTA
atcctttaatttttaatttt

SEQ ID NO: 413133 - DNA, 20 bp, Artificial Sequence
  Description of Artificial Sequence: Synthetic oligonucleotide
  Target: LAMA2; (+) strand; PAM type: YTN; PAM sequence: CTT
taatttttaatttttgtggg

SEQ ID NO: 413134 - DNA, 20 bp, Artificial Sequence
  Description of Artificial Sequence: Synthetic oligonucleotide
  Target: LAMA2; (+) strand; PAM type: YTN; PAM sequence: TTT
aatttttaatttttgtgggt

SEQ ID NO: 413135 - DNA, 20 bp, Artificial Sequence
  Description of Artificial Sequence: Synthetic oligonucleotide
  Target: LAMA2; (+) strand; PAM type: YTN; PAM sequence: TTA
atttttaatttttgtgggta

SEQ ID NO: 413136 - DNA, 20 bp, Artificial Sequence
  Description of Artificial Sequence: Synthetic oligonucleotide
  Target: LAMA2; (+) strand; PAM type: YTN; PAM sequence: TTT
ttaatttttgtgggtacaca

SEQ ID NO: 413137 - DNA, 20 bp, Artificial Sequence
  Description of Artificial Sequence: Synthetic oligonucleotide
  Target: LAMA2; (+) strand; PAM type: YTN; PAM sequence: TTT
taatttttgtgggtacacag

SEQ ID NO: 413138 - DNA, 20 bp, Artificial Sequence
  Description of Artificial Sequence: Synthetic oligonucleotide
  Target: LAMA2; (+) strand; PAM type: YTN; PAM sequence: TTT
aatttttgtgggtacacagt

SEQ ID NO: 413139 - DNA, 20 bp, Artificial Sequence
  Description of Artificial Sequence: Synthetic oligonucleotide
  Target: LAMA2; (+) strand; PAM type: YTN; PAM sequence: TTA
atttttgtgggtacacagtg

SEQ ID NO: 413140 - DNA, 20 bp, Artificial Sequence
  Description of Artificial Sequence: Synthetic oligonucleotide
  Target: LAMA2; (+) strand; PAM type: YTN; PAM sequence: TTT
ttgtgggtacacagtgggtg

SEQ ID NO: 413141 - DNA, 20 bp, Artificial Sequence
  Description of Artificial Sequence: Synthetic oligonucleotide
  Target: LAMA2; (+) strand; PAM type: YTN; PAM sequence: TTT
tgtgggtacacagtgggtgt

SEQ ID NO: 413142 - DNA, 20 bp, Artificial Sequence
  Description of Artificial Sequence: Synthetic oligonucleotide
  Target: LAMA2; (+) strand; PAM type: YTN; PAM sequence: TTT
gtgggtacacagtgggtgta

SEQ ID NO: 413143 - DNA, 20 bp, Artificial Sequence
  Description of Artificial Sequence: Synthetic oligonucleotide
  Target: LAMA2; (+) strand; PAM type: YTN; PAM sequence: TTG
tgggtacacagtgggtgtat

SEQ ID NO: 413144 - DNA, 20 bp, Artificial Sequence
  Description of Artificial Sequence: Synthetic oligonucleotide
  Target: LAMA2; (+) strand; PAM type: YTN; PAM sequence: TTT
atgggtgacctgagatattt

SEQ ID NO: 413145 - DNA, 20 bp, Artificial Sequence
  Description of Artificial Sequence: Synthetic oligonucleotide
  Target: LAMA2; (+) strand; PAM type: YTN; PAM sequence: TTA
tgggtgacctgagatatttt

SEQ ID NO: 413146 - DNA, 20 bp, Artificial Sequence
  Description of Artificial Sequence: Synthetic oligonucleotide
  Target: LAMA2; (+) strand; PAM type: YTN; PAM sequence: CTG
agatattttgatgtaggcat

SEQ ID NO: 413147 - DNA, 20 bp, Artificial Sequence
  Description of Artificial Sequence: Synthetic oligonucleotide
  Target: LAMA2; (+) strand; PAM type: YTN; PAM sequence: TTT
tgatgtaggcatgcaatgca

SEQ ID NO: 413148 - DNA, 20 bp, Artificial Sequence
  Description of Artificial Sequence: Synthetic oligonucleotide
  Target: LAMA2; (+) strand; PAM type: YTN; PAM sequence: TTT
gatgtaggcatgcaatgcat

SEQ ID NO: 413149 - DNA, 20 bp, Artificial Sequence
  Description of Artificial Sequence: Synthetic oligonucleotide
  Target: LAMA2; (+) strand; PAM type: YTN; PAM sequence: TTG
atgtaggcatgcaatgcata

SEQ ID NO: 413150 - DNA, 20 bp, Artificial Sequence
  Description of Artificial Sequence: Synthetic oligonucleotide
  Target: LAMA2; (+) strand; PAM type: YTN; PAM sequence: CTC
aaacatgtatcctttatgtt

SEQ ID NO: 413151 - DNA, 20 bp, Artificial Sequence
  Description of Artificial Sequence: Synthetic oligonucleotide
  Target: LAMA2; (+) strand; PAM type: YTN; PAM sequence: CTT
tatgtttcaaacaatctgat

SEQ ID NO: 413152 - DNA, 20 bp, Artificial Sequence
  Description of Artificial Sequence: Synthetic oligonucleotide
  Target: LAMA2; (+) strand; PAM type: YTN; PAM sequence: TTT
atgtttcaaacaatctgatt

SEQ ID NO: 413153 - DNA, 20 bp, Artificial Sequence
  Description of Artificial Sequence: Synthetic oligonucleotide
  Target: LAMA2; (+) strand; PAM type: YTN; PAM sequence: TTA
tgtttcaaacaatctgatta

SEQ ID NO: 413154 - DNA, 20 bp, Artificial Sequence
  Description of Artificial Sequence: Synthetic oligonucleotide
  Target: LAMA2; (+) strand; PAM type: YTN; PAM sequence: TTT
caaacaatctgattatactc

SEQ ID NO: 413155 - DNA, 20 bp, Artificial Sequence
  Description of Artificial Sequence: Synthetic oligonucleotide
  Target: LAMA2; (+) strand; PAM type: YTN; PAM sequence: TTC
aaacaatctgattatactct

SEQ ID NO: 413156 - DNA, 20 bp, Artificial Sequence
  Description of Artificial Sequence: Synthetic oligonucleotide
  Target: LAMA2; (+) strand; PAM type: YTN; PAM sequence: CTG
attatactcttttagttatt

SEQ ID NO: 413157 - DNA, 20 bp, Artificial Sequence
  Description of Artificial Sequence: Synthetic oligonucleotide
  Target: LAMA2; (+) strand; PAM type: YTN; PAM sequence: TTA
tactcttttagttattttta

SEQ ID NO: 413158 - DNA, 20 bp, Artificial Sequence
  Description of Artificial Sequence: Synthetic oligonucleotide
  Target: LAMA2; (+) strand; PAM type: YTN; PAM sequence: CTC
ttttagttatttttaaatgt

SEQ ID NO: 413159 - DNA, 20 bp, Artificial Sequence
  Description of Artificial Sequence: Synthetic oligonucleotide
  Target: LAMA2; (+) strand; PAM type: YTN; PAM sequence: CTT
ttagttatttttaaatgtac

SEQ ID NO: 413160 - DNA, 20 bp, Artificial Sequence
  Description of Artificial Sequence: Synthetic oligonucleotide
  Target: LAMA2; (+) strand; PAM type: YTN; PAM sequence: TTT
tagttatttttaaatgtaca

SEQ ID NO: 413161 - DNA, 20 bp, Artificial Sequence
  Description of Artificial Sequence: Synthetic oligonucleotide
  Target: LAMA2; (+) strand; PAM type: YTN; PAM sequence: TTT
agttatttttaaatgtacaa

SEQ ID NO: 413162 - DNA, 20 bp, Artificial Sequence
  Description of Artificial Sequence: Synthetic oligonucleotide
  Target: LAMA2; (+) strand; PAM type: YTN; PAM sequence: TTA
gttatttttaaatgtacaat

SEQ ID NO: 413163 - DNA, 20 bp, Artificial Sequence
  Description of Artificial Sequence: Synthetic oligonucleotide
  Target: LAMA2; (+) strand; PAM type: YTN; PAM sequence: TTA
tttttaaatgtacaattatt

SEQ ID NO: 413164 - DNA, 20 bp, Artificial Sequence
  Description of Artificial Sequence: Synthetic oligonucleotide
  Target: LAMA2; (+) strand; PAM type: YTN; PAM sequence: TTT
ttaaatgtacaattattttt

SEQ ID NO: 413165 - DNA, 20 bp, Artificial Sequence
  Description of Artificial Sequence: Synthetic oligonucleotide
  Target: LAMA2; (+) strand; PAM type: YTN; PAM sequence: TTT
taaatgtacaattatttttt

SEQ ID NO: 413166 - DNA, 20 bp, Artificial Sequence
  Description of Artificial Sequence: Synthetic oligonucleotide
  Target: LAMA2; (+) strand; PAM type: YTN; PAM sequence: TTT
aaatgtacaattattttttt

SEQ ID NO: 413167 - DNA, 20 bp, Artificial Sequence
  Description of Artificial Sequence: Synthetic oligonucleotide
  Target: LAMA2; (+) strand; PAM type: YTN; PAM sequence: TTA
aatgtacaattatttttttt

SEQ ID NO: 413168 - DNA, 20 bp, Artificial Sequence
  Description of Artificial Sequence: Synthetic oligonucleotide
  Target: LAMA2; (+) strand; PAM type: YTN; PAM sequence: TTA
tttttttttttttactgtag

SEQ ID NO: 413169 - DNA, 20 bp, Artificial Sequence
  Description of Artificial Sequence: Synthetic oligonucleotide
  Target: LAMA2; (+) strand; PAM type: YTN; PAM sequence: TTT
ttttttttttactgtagtta

SEQ ID NO: 413170 - DNA, 20 bp, Artificial Sequence
  Description of Artificial Sequence: Synthetic oligonucleotide
  Target: LAMA2; (+) strand; PAM type: YTN; PAM sequence: TTT
tttttttttactgtagttac

SEQ ID NO: 413171 - DNA, 20 bp, Artificial Sequence
  Description of Artificial Sequence: Synthetic oligonucleotide
  Target: LAMA2; (+) strand; PAM type: YTN; PAM sequence: TTT
ttttttttactgtagttacc

SEQ ID NO: 413172 - DNA, 20 bp, Artificial Sequence
  Description of Artificial Sequence: Synthetic oligonucleotide
  Target: LAMA2; (+) strand; PAM type: YTN; PAM sequence: TTT
tttttttactgtagttaccc

SEQ ID NO: 413173 - DNA, 20 bp, Artificial Sequence
  Description of Artificial Sequence: Synthetic oligonucleotide
  Target: LAMA2; (+) strand; PAM type: YTN; PAM sequence: TTT
ttttttactgtagttaccct

SEQ ID NO: 413174 - DNA, 20 bp, Artificial Sequence
  Description of Artificial Sequence: Synthetic oligonucleotide
  Target: LAMA2; (+) strand; PAM type: YTN; PAM sequence: TTT
tttttactgtagttaccctt

SEQ ID NO: 413175 - DNA, 20 bp, Artificial Sequence
  Description of Artificial Sequence: Synthetic oligonucleotide
  Target: LAMA2; (+) strand; PAM type: YTN; PAM sequence: TTT
ttttactgtagttacccttg

SEQ ID NO: 413176 - DNA, 20 bp, Artificial Sequence
  Description of Artificial Sequence: Synthetic oligonucleotide
  Target: LAMA2; (+) strand; PAM type: YTN; PAM sequence: TTT
tttactgtagttacccttgt

SEQ ID NO: 413177 - DNA, 20 bp, Artificial Sequence
  Description of Artificial Sequence: Synthetic oligonucleotide
  Target: LAMA2; (+) strand; PAM type: YTN; PAM sequence: TTT
ttactgtagttacccttgtg

SEQ ID NO: 413178 - DNA, 20 bp, Artificial Sequence
  Description of Artificial Sequence: Synthetic oligonucleotide
  Target: LAMA2; (+) strand; PAM type: YTN; PAM sequence: TTT
tactgtagttacccttgtgc

SEQ ID NO: 413179 - DNA, 20 bp, Artificial Sequence
  Description of Artificial Sequence: Synthetic oligonucleotide
  Target: LAMA2; (+) strand; PAM type: YTN; PAM sequence: TTT
actgtagttacccttgtgct

SEQ ID NO: 413180 - DNA, 20 bp, Artificial Sequence
  Description of Artificial Sequence: Synthetic oligonucleotide
  Target: LAMA2; (+) strand; PAM type: YTN; PAM sequence: TTA
ctgtagttacccttgtgcta

SEQ ID NO: 413181 - DNA, 20 bp, Artificial Sequence
  Description of Artificial Sequence: Synthetic oligonucleotide
  Target: LAMA2; (+) strand; PAM type: YTN; PAM sequence: CTG
tagttacccttgtgctagca

SEQ ID NO: 413182 - DNA, 20 bp, Artificial Sequence
  Description of Artificial Sequence: Synthetic oligonucleotide
  Target: LAMA2; (+) strand; PAM type: YTN; PAM sequence: TTA
cccttgtgctagcaaatact

SEQ ID NO: 413183 - DNA, 20 bp, Artificial Sequence
  Description of Artificial Sequence: Synthetic oligonucleotide
  Target: LAMA2; (+) strand; PAM type: YTN; PAM sequence: CTT
gtgctagcaaatactaaatc

SEQ ID NO: 413184 - DNA, 20 bp, Artificial Sequence
  Description of Artificial Sequence: Synthetic oligonucleotide
  Target: LAMA2; (+) strand; PAM type: YTN; PAM sequence: TTG
tgctagcaaatactaaatct

SEQ ID NO: 413185 - DNA, 20 bp, Artificial Sequence
  Description of Artificial Sequence: Synthetic oligonucleotide
  Target: LAMA2; (+) strand; PAM type: YTN; PAM sequence: CTA
gcaaatactaaatcttattc

SEQ ID NO: 413186 - DNA, 20 bp, Artificial Sequence
  Description of Artificial Sequence: Synthetic oligonucleotide
  Target: LAMA2; (+) strand; PAM type: YTN; PAM sequence: CTA
aatcttattcaaactatttt

SEQ ID NO: 413187 - DNA, 20 bp, Artificial Sequence
  Description of Artificial Sequence: Synthetic oligonucleotide
  Target: LAMA2; (+) strand; PAM type: YTN; PAM sequence: CTT
attcaaactatttttgtatc

SEQ ID NO: 413188 - DNA, 20 bp, Artificial Sequence
  Description of Artificial Sequence: Synthetic oligonucleotide
  Target: LAMA2; (+) strand; PAM type: YTN; PAM sequence: TTA
ttcaaactatttttgtatca

SEQ ID NO: 413189 - DNA, 20 bp, Artificial Sequence
  Description of Artificial Sequence: Synthetic oligonucleotide
  Target: LAMA2; (+) strand; PAM type: YTN; PAM sequence: TTC
aaactatttttgtatcatta

SEQ ID NO: 413190 - DNA, 20 bp, Artificial Sequence
  Description of Artificial Sequence: Synthetic oligonucleotide
  Target: LAMA2; (+) strand; PAM type: YTN; PAM sequence: CTA
tttttgtatcattaaccatc

SEQ ID NO: 413191 - DNA, 20 bp, Artificial Sequence
  Description of Artificial Sequence: Synthetic oligonucleotide
  Target: LAMA2; (+) strand; PAM type: YTN; PAM sequence: TTT
ttgtatcattaaccatccct

SEQ ID NO: 413192 - DNA, 20 bp, Artificial Sequence
  Description of Artificial Sequence: Synthetic oligonucleotide
  Target: LAMA2; (+) strand; PAM type: YTN; PAM sequence: TTT
tgtatcattaaccatcccta

SEQ ID NO: 413193 - DNA, 20 bp, Artificial Sequence
  Description of Artificial Sequence: Synthetic oligonucleotide
  Target: LAMA2; (+) strand; PAM type: YTN; PAM sequence: TTT
gtatcattaaccatccctac

SEQ ID NO: 413194 - DNA, 20 bp, Artificial Sequence
  Description of Artificial Sequence: Synthetic oligonucleotide
  Target: LAMA2; (+) strand; PAM type: YTN; PAM sequence: TTG
tatcattaaccatccctact

SEQ ID NO: 413195 - DNA, 20 bp, Artificial Sequence
  Description of Artificial Sequence: Synthetic oligonucleotide
  Target: LAMA2; (+) strand; PAM type: YTN; PAM sequence: TTA
accatccctactcctccctg

SEQ ID NO: 413196 - DNA, 20 bp, Artificial Sequence
  Description of Artificial Sequence: Synthetic oligonucleotide
  Target: LAMA2; (+) strand; PAM type: YTN; PAM sequence: CTA
ctcctccctgccactaacct

SEQ ID NO: 413197 - DNA, 20 bp, Artificial Sequence
  Description of Artificial Sequence: Synthetic oligonucleotide
  Target: LAMA2; (+) strand; PAM type: YTN; PAM sequence: CTC
ctccctgccactaaccttcc

SEQ ID NO: 413198 - DNA, 20 bp, Artificial Sequence
  Description of Artificial Sequence: Synthetic oligonucleotide
  Target: LAMA2; (+) strand; PAM type: YTN; PAM sequence: CTC
cctgccactaaccttcccaa

SEQ ID NO: 413199 - DNA, 20 bp, Artificial Sequence
  Description of Artificial Sequence: Synthetic oligonucleotide
  Target: LAMA2; (+) strand; PAM type: YTN; PAM sequence: CTG
ccactaaccttcccaacctc

SEQ ID NO: 413200 - DNA, 20 bp, Artificial Sequence
  Description of Artificial Sequence: Synthetic oligonucleotide
  Target: LAMA2; (+) strand; PAM type: YTN; PAM sequence: CTA
accttcccaacctctggtaa

SEQ ID NO: 413201 - DNA, 20 bp, Artificial Sequence
  Description of Artificial Sequence: Synthetic oligonucleotide
  Target: LAMA2; (+) strand; PAM type: YTN; PAM sequence: CTT
cccaacctctggtaactatc

SEQ ID NO: 413202 - DNA, 20 bp, Artificial Sequence
  Description of Artificial Sequence: Synthetic oligonucleotide
  Target: LAMA2; (+) strand; PAM type: YTN; PAM sequence: TTC
ccaacctctggtaactatcc

SEQ ID NO: 413203 - DNA, 20 bp, Artificial Sequence
  Description of Artificial Sequence: Synthetic oligonucleotide
  Target: LAMA2; (+) strand; PAM type: YTN; PAM sequence: CTC
tggtaactatccttctactt

SEQ ID NO: 413204 - DNA, 20 bp, Artificial Sequence
  Description of Artificial Sequence: Synthetic oligonucleotide
  Target: LAMA2; (+) strand; PAM type: YTN; PAM sequence: CTG
gtaactatccttctactttc

SEQ ID NO: 413205 - DNA, 20 bp, Artificial Sequence
  Description of Artificial Sequence: Synthetic oligonucleotide
  Target: LAMA2; (+) strand; PAM type: YTN; PAM sequence: CTA
tccttctactttctatctat

SEQ ID NO: 413206 - DNA, 20 bp, Artificial Sequence
  Description of Artificial Sequence: Synthetic oligonucleotide
  Target: LAMA2; (+) strand; PAM type: YTN; PAM sequence: CTT
ctactttctatctatctcca

SEQ ID NO: 413207 - DNA, 20 bp, Artificial Sequence
  Description of Artificial Sequence: Synthetic oligonucleotide
  Target: LAMA2; (+) strand; PAM type: YTN; PAM sequence: TTC
tactttctatctatctccat

SEQ ID NO: 413208 - DNA, 20 bp, Artificial Sequence
  Description of Artificial Sequence: Synthetic oligonucleotide
  Target: LAMA2; (+) strand; PAM type: YTN; PAM sequence: CTA
ctttctatctatctccatga

SEQ ID NO: 413209 - DNA, 20 bp, Artificial Sequence
  Description of Artificial Sequence: Synthetic oligonucleotide
  Target: LAMA2; (+) strand; PAM type: YTN; PAM sequence: CTT
tctatctatctccatgagtt

SEQ ID NO: 413210 - DNA, 20 bp, Artificial Sequence
  Description of Artificial Sequence: Synthetic oligonucleotide
  Target: LAMA2; (+) strand; PAM type: YTN; PAM sequence: TTT
ctatctatctccatgagttg

SEQ ID NO: 413211 - DNA, 20 bp, Artificial Sequence
  Description of Artificial Sequence: Synthetic oligonucleotide
  Target: LAMA2; (+) strand; PAM type: YTN; PAM sequence: TTC
tatctatctccatgagttga

SEQ ID NO: 413212 - DNA, 20 bp, Artificial Sequence
  Description of Artificial Sequence: Synthetic oligonucleotide
  Target: LAMA2; (+) strand; PAM type: YTN; PAM sequence: CTA
tctatctccatgagttgaat

SEQ ID NO: 413213 - DNA, 20 bp, Artificial Sequence
  Description of Artificial Sequence: Synthetic oligonucleotide
  Target: LAMA2; (+) strand; PAM type: YTN; PAM sequence: CTA
tctccatgagttgaattgct

SEQ ID NO: 413214 - DNA, 20 bp, Artificial Sequence
  Description of Artificial Sequence: Synthetic oligonucleotide
  Target: LAMA2; (+) strand; PAM type: YTN; PAM sequence: CTC
catgagttgaattgctttaa

SEQ ID NO: 413215 - DNA, 20 bp, Artificial Sequence
  Description of Artificial Sequence: Synthetic oligonucleotide
  Target: LAMA2; (+) strand; PAM type: YTN; PAM sequence: TTG
aattgctttaatttttagct

SEQ ID NO: 413216 - DNA, 20 bp, Artificial Sequence
  Description of Artificial Sequence: Synthetic oligonucleotide
  Target: LAMA2; (+) strand; PAM type: YTN; PAM sequence: TTG
ctttaatttttagctcccac

SEQ ID NO: 413217 - DNA, 20 bp, Artificial Sequence
  Description of Artificial Sequence: Synthetic oligonucleotide
  Target: LAMA2; (+) strand; PAM type: YTN; PAM sequence: CTT
taatttttagctcccacaga

SEQ ID NO: 413218 - DNA, 20 bp, Artificial Sequence
  Description of Artificial Sequence: Synthetic oligonucleotide
  Target: LAMA2; (+) strand; PAM type: YTN; PAM sequence: TTT
aatttttagctcccacagat

SEQ ID NO: 413219 - DNA, 20 bp, Artificial Sequence
  Description of Artificial Sequence: Synthetic oligonucleotide
  Target: LAMA2; (+) strand; PAM type: YTN; PAM sequence: TTA
atttttagctcccacagata

SEQ ID NO: 413220 - DNA, 20 bp, Artificial Sequence
  Description of Artificial Sequence: Synthetic oligonucleotide
  Target: LAMA2; (+) strand; PAM type: YTN; PAM sequence: TTT
ttagctcccacagataagtg

SEQ ID NO: 413221 - DNA, 20 bp, Artificial Sequence
  Description of Artificial Sequence: Synthetic oligonucleotide
  Target: LAMA2; (+) strand; PAM type: YTN; PAM sequence: TTT
tagctcccacagataagtga

SEQ ID NO: 413222 - DNA, 20 bp, Artificial Sequence
  Description of Artificial Sequence: Synthetic oligonucleotide
  Target: LAMA2; (+) strand; PAM type: YTN; PAM sequence: TTT
agctcccacagataagtgag

SEQ ID NO: 413223 - DNA, 20 bp, Artificial Sequence
  Description of Artificial Sequence: Synthetic oligonucleotide
  Target: LAMA2; (+) strand; PAM type: YTN; PAM sequence: TTA
gctcccacagataagtgaga

SEQ ID NO: 413224 - DNA, 20 bp, Artificial Sequence
  Description of Artificial Sequence: Synthetic oligonucleotide
  Target: LAMA2; (+) strand; PAM type: YTN; PAM sequence: CTC
ccacagataagtgagaacat

SEQ ID NO: 413225 - DNA, 20 bp, Artificial Sequence
  Description of Artificial Sequence: Synthetic oligonucleotide
  Target: LAMA2; (+) strand; PAM type: YTN; PAM sequence: TTT
gcctttgtgtgcctggctta

SEQ ID NO: 413226 - DNA, 20 bp, Artificial Sequence
  Description of Artificial Sequence: Synthetic oligonucleotide
  Target: LAMA2; (+) strand; PAM type: YTN; PAM sequence: TTG
cctttgtgtgcctggcttat

SEQ ID NO: 413227 - DNA, 20 bp, Artificial Sequence
  Description of Artificial Sequence: Synthetic oligonucleotide
  Target: LAMA2; (+) strand; PAM type: YTN; PAM sequence: CTT
tgtgtgcctggcttatttca

SEQ ID NO: 413228 - DNA, 20 bp, Artificial Sequence
  Description of Artificial Sequence: Synthetic oligonucleotide
  Target: LAMA2; (+) strand; PAM type: YTN; PAM sequence: TTT
gtgtgcctggcttatttcac

SEQ ID NO: 413229 - DNA, 20 bp, Artificial Sequence
  Description of Artificial Sequence: Synthetic oligonucleotide
  Target: LAMA2; (+) strand; PAM type: YTN; PAM sequence: TTG
tgtgcctggcttatttcact

SEQ ID NO: 413230 - DNA, 20 bp, Artificial Sequence
  Description of Artificial Sequence: Synthetic oligonucleotide
  Target: LAMA2; (+) strand; PAM type: YTN; PAM sequence: CTG
gcttatttcacttaacataa

SEQ ID NO: 413231 - DNA, 20 bp, Artificial Sequence
  Description of Artificial Sequence: Synthetic oligonucleotide
  Target: LAMA2; (+) strand; PAM type: YTN; PAM sequence: CTT
atttcacttaacataatgac

SEQ ID NO: 413232 - DNA, 20 bp, Artificial Sequence
  Description of Artificial Sequence: Synthetic oligonucleotide
  Target: LAMA2; (+) strand; PAM type: YTN; PAM sequence: TTA
tttcacttaacataatgacc

SEQ ID NO: 413233 - DNA, 20 bp, Artificial Sequence
  Description of Artificial Sequence: Synthetic oligonucleotide
  Target: LAMA2; (+) strand; PAM type: YTN; PAM sequence: TTT
cacttaacataatgacctca

SEQ ID NO: 413234 - DNA, 20 bp, Artificial Sequence
  Description of Artificial Sequence: Synthetic oligonucleotide
  Target: LAMA2; (+) strand; PAM type: YTN; PAM sequence: TTC
acttaacataatgacctcaa

SEQ ID NO: 413235 - DNA, 20 bp, Artificial Sequence
  Description of Artificial Sequence: Synthetic oligonucleotide
  Target: LAMA2; (+) strand; PAM type: YTN; PAM sequence: CTT
aacataatgacctcaagaac

SEQ ID NO: 413236 - DNA, 20 bp, Artificial Sequence
  Description of Artificial Sequence: Synthetic oligonucleotide
  Target: LAMA2; (+) strand; PAM type: YTN; PAM sequence: TTA
acataatgacctcaagaacc

SEQ ID NO: 413237 - DNA, 20 bp, Artificial Sequence
  Description of Artificial Sequence: Synthetic oligonucleotide
  Target: LAMA2; (+) strand; PAM type: YTN; PAM sequence: CTC
aagaaccacccatgttgttg

SEQ ID NO: 413238 - DNA, 20 bp, Artificial Sequence
  Description of Artificial Sequence: Synthetic oligonucleotide
  Target: LAMA2; (+) strand; PAM type: YTN; PAM sequence: TTG
ttgcagatgataggatctca

SEQ ID NO: 413239 - DNA, 20 bp, Artificial Sequence
  Description of Artificial Sequence: Synthetic oligonucleotide
  Target: LAMA2; (+) strand; PAM type: YTN; PAM sequence: TTG
cagatgataggatctcattc

SEQ ID NO: 413240 - DNA, 20 bp, Artificial Sequence
  Description of Artificial Sequence: Synthetic oligonucleotide
  Target: LAMA2; (+) strand; PAM type: YTN; PAM sequence: CTC
attcttttttatggcttatt

SEQ ID NO: 413241 - DNA, 20 bp, Artificial Sequence
  Description of Artificial Sequence: Synthetic oligonucleotide
  Target: LAMA2; (+) strand; PAM type: YTN; PAM sequence: TTC
ttttttatggcttattcata

SEQ ID NO: 413242 - DNA, 20 bp, Artificial Sequence
  Description of Artificial Sequence: Synthetic oligonucleotide
  Target: LAMA2; (+) strand; PAM type: YTN; PAM sequence: CTT
ttttatggcttattcatatc

SEQ ID NO: 413243 - DNA, 20 bp, Artificial Sequence
  Description of Artificial Sequence: Synthetic oligonucleotide
  Target: LAMA2; (+) strand; PAM type: YTN; PAM sequence: TTT
tttatggcttattcatatcc

SEQ ID NO: 413244 - DNA, 20 bp, Artificial Sequence
  Description of Artificial Sequence: Synthetic oligonucleotide
  Target: LAMA2; (+) strand; PAM type: YTN; PAM sequence: TTT
ttatggcttattcatatcca

SEQ ID NO: 413245 - DNA, 20 bp, Artificial Sequence
  Description of Artificial Sequence: Synthetic oligonucleotide
  Target: LAMA2; (+) strand; PAM type: YTN; PAM sequence: TTT
tatggcttattcatatccag

SEQ ID NO: 413246 - DNA, 20 bp, Artificial Sequence
  Description of Artificial Sequence: Synthetic oligonucleotide
  Target: LAMA2; (+) strand; PAM type: YTN; PAM sequence: TTT
atggcttattcatatccagt

SEQ ID NO: 413247 - DNA, 20 bp, Artificial Sequence
  Description of Artificial Sequence: Synthetic oligonucleotide
  Target: LAMA2; (+) strand; PAM type: YTN; PAM sequence: TTA
tggcttattcatatccagta

SEQ ID NO: 413248 - DNA, 20 bp, Artificial Sequence
  Description of Artificial Sequence: Synthetic oligonucleotide
  Target: LAMA2; (+) strand; PAM type: YTN; PAM sequence: CTT
attcatatccagtatgtata

SEQ ID NO: 413249 - DNA, 20 bp, Artificial Sequence
  Description of Artificial Sequence: Synthetic oligonucleotide
  Target: LAMA2; (+) strand; PAM type: YTN; PAM sequence: TTA
ttcatatccagtatgtatat

SEQ ID NO: 413250 - DNA, 20 bp, Artificial Sequence
  Description of Artificial Sequence: Synthetic oligonucleotide
  Target: LAMA2; (+) strand; PAM type: YTN; PAM sequence: TTC
atatccagtatgtatatgta

SEQ ID NO: 413251 - DNA, 20 bp, Artificial Sequence
  Description of Artificial Sequence: Synthetic oligonucleotide
  Target: LAMA2; (+) strand; PAM type: YTN; PAM sequence: CTT
tctttatccgttcatctgct

SEQ ID NO: 413252 - DNA, 20 bp, Artificial Sequence
  Description of Artificial Sequence: Synthetic oligonucleotide
  Target: LAMA2; (+) strand; PAM type: YTN; PAM sequence: TTT
ctttatccgttcatctgctg

SEQ ID NO: 413253 - DNA, 20 bp, Artificial Sequence
  Description of Artificial Sequence: Synthetic oligonucleotide
  Target: LAMA2; (+) strand; PAM type: YTN; PAM sequence: TTC
tttatccgttcatctgctga

SEQ ID NO: 413254 - DNA, 20 bp, Artificial Sequence
  Description of Artificial Sequence: Synthetic oligonucleotide
  Target: LAMA2; (+) strand; PAM type: YTN; PAM sequence: CTT
tatccgttcatctgctgatg

SEQ ID NO: 413255 - DNA, 20 bp, Artificial Sequence
  Description of Artificial Sequence: Synthetic oligonucleotide
  Target: LAMA2; (+) strand; PAM type: YTN; PAM sequence: TTT
atccgttcatctgctgatgg

SEQ ID NO: 413256 - DNA, 20 bp, Artificial Sequence
  Description of Artificial Sequence: Synthetic oligonucleotide
  Target: LAMA2; (+) strand; PAM type: YTN; PAM sequence: TTA
tccgttcatctgctgatgga

SEQ ID NO: 413257 - DNA, 20 bp, Artificial Sequence
  Description of Artificial Sequence: Synthetic oligonucleotide
  Target: LAMA2; (+) strand; PAM type: YTN; PAM sequence: TTC
atctgctgatggacacttag

SEQ ID NO: 413258 - DNA, 20 bp, Artificial Sequence
  Description of Artificial Sequence: Synthetic oligonucleotide
  Target: LAMA2; (+) strand; PAM type: YTN; PAM sequence: CTG
ctgatggacacttaggtggc

SEQ ID NO: 413259 - DNA, 20 bp, Artificial Sequence
  Description of Artificial Sequence: Synthetic oligonucleotide
  Target: LAMA2; (+) strand; PAM type: YTN; PAM sequence: CTG
atggacacttaggtggcttc

SEQ ID NO: 413260 - DNA, 20 bp, Artificial Sequence
  Description of Artificial Sequence: Synthetic oligonucleotide
  Target: LAMA2; (+) strand; PAM type: YTN; PAM sequence: CTT
aggtggcttccaaatctatt

SEQ ID NO: 413261 - DNA, 20 bp, Artificial Sequence
  Description of Artificial Sequence: Synthetic oligonucleotide
  Target: LAMA2; (+) strand; PAM type: YTN; PAM sequence: TTA
ggtggcttccaaatctattg

SEQ ID NO: 413262 - DNA, 20 bp, Artificial Sequence
  Description of Artificial Sequence: Synthetic oligonucleotide
  Target: LAMA2; (+) strand; PAM type: YTN; PAM sequence: CTT
ccaaatctattgtaactagt

SEQ ID NO: 413263 - DNA, 20 bp, Artificial Sequence
  Description of Artificial Sequence: Synthetic oligonucleotide
  Target: LAMA2; (+) strand; PAM type: YTN; PAM sequence: TTC
caaatctattgtaactagtg

SEQ ID NO: 413264 - DNA, 20 bp, Artificial Sequence
  Description of Artificial Sequence: Synthetic oligonucleotide
  Target: LAMA2; (+) strand; PAM type: YTN; PAM sequence: CTA
ttgtaactagtgctgcaata

SEQ ID NO: 413265 - DNA, 20 bp, Artificial Sequence
  Description of Artificial Sequence: Synthetic oligonucleotide
  Target: LAMA2; (+) strand; PAM type: YTN; PAM sequence: TTG
taactagtgctgcaataaac

SEQ ID NO: 413266 - DNA, 20 bp, Artificial Sequence
  Description of Artificial Sequence: Synthetic oligonucleotide
  Target: LAMA2; (+) strand; PAM type: YTN; PAM sequence: CTA
gtgctgcaataaacgtggga

SEQ ID NO: 413267 - DNA, 20 bp, Artificial Sequence
  Description of Artificial Sequence: Synthetic oligonucleotide
  Target: LAMA2; (+) strand; PAM type: YTN; PAM sequence: CTG
caataaacgtgggagtgcag

SEQ ID NO: 413268 - DNA, 20 bp, Artificial Sequence
  Description of Artificial Sequence: Synthetic oligonucleotide
  Target: LAMA2; (+) strand; PAM type: YTN; PAM sequence: CTC
ttcaatattcttttgggtat

SEQ ID NO: 413269 - DNA, 20 bp, Artificial Sequence
  Description of Artificial Sequence: Synthetic oligonucleotide
  Target: LAMA2; (+) strand; PAM type: YTN; PAM sequence: CTT
caatattcttttgggtatat

SEQ ID NO: 413270 - DNA, 20 bp, Artificial Sequence
  Description of Artificial Sequence: Synthetic oligonucleotide
  Target: LAMA2; (+) strand; PAM type: YTN; PAM sequence: TTC
aatattcttttgggtatata

SEQ ID NO: 413271 - DNA, 20 bp, Artificial Sequence
  Description of Artificial Sequence: Synthetic oligonucleotide
  Target: LAMA2; (+) strand; PAM type: YTN; PAM sequence: TTC
ttttgggtatatatctaaga

SEQ ID NO: 413272 - DNA, 20 bp, Artificial Sequence
  Description of Artificial Sequence: Synthetic oligonucleotide
  Target: LAMA2; (+) strand; PAM type: YTN; PAM sequence: CTT
ttgggtatatatctaagagt

SEQ ID NO: 413273 - DNA, 20 bp, Artificial Sequence
  Description of Artificial Sequence: Synthetic oligonucleotide
  Target: LAMA2; (+) strand; PAM type: YTN; PAM sequence: TTT
tgggtatatatctaagagtg

SEQ ID NO: 413274 - DNA, 20 bp, Artificial Sequence
  Description of Artificial Sequence: Synthetic oligonucleotide
  Target: LAMA2; (+) strand; PAM type: YTN; PAM sequence: TTT
gggtatatatctaagagtgg

SEQ ID NO: 413275 - DNA, 20 bp, Artificial Sequence
  Description of Artificial Sequence: Synthetic oligonucleotide
  Target: LAMA2; (+) strand; PAM type: YTN; PAM sequence: TTG
ggtatatatctaagagtgga

SEQ ID NO: 413276 - DNA, 20 bp, Artificial Sequence
  Description of Artificial Sequence: Synthetic oligonucleotide
  Target: LAMA2; (+) strand; PAM type: YTN; PAM sequence: CTA
agagtggaattgatggatca

SEQ ID NO: 413277 - DNA, 20 bp, Artificial Sequence
  Description of Artificial Sequence: Synthetic oligonucleotide
  Target: LAMA2; (+) strand; PAM type: YTN; PAM sequence: TTG
atggatcatatggtagctct

SEQ ID NO: 413278 - DNA, 20 bp, Artificial Sequence
  Description of Artificial Sequence: Synthetic oligonucleotide
  Target: LAMA2; (+) strand; PAM type: YTN; PAM sequence: CTC
tatttttggtgttttgagga

SEQ ID NO: 413279 - DNA, 20 bp, Artificial Sequence
  Description of Artificial Sequence: Synthetic oligonucleotide
  Target: LAMA2; (+) strand; PAM type: YTN; PAM sequence: CTA
tttttggtgttttgaggaac

SEQ ID NO: 413280 - DNA, 20 bp, Artificial Sequence
  Description of Artificial Sequence: Synthetic oligonucleotide
  Target: LAMA2; (+) strand; PAM type: YTN; PAM sequence: TTT
ttggtgttttgaggaacctc

SEQ ID NO: 413281 - DNA, 20 bp, Artificial Sequence
  Description of Artificial Sequence: Synthetic oligonucleotide
  Target: LAMA2; (+) strand; PAM type: YTN; PAM sequence: TTT
tggtgttttgaggaacctcc

SEQ ID NO: 413282 - DNA, 20 bp, Artificial Sequence
  Description of Artificial Sequence: Synthetic oligonucleotide
  Target: LAMA2; (+) strand; PAM type: YTN; PAM sequence: TTT
ggtgttttgaggaacctcca

SEQ ID NO: 413283 - DNA, 20 bp, Artificial Sequence
  Description of Artificial Sequence: Synthetic oligonucleotide
  Target: LAMA2; (+) strand; PAM type: YTN; PAM sequence: TTG
gtgttttgaggaacctccaa

SEQ ID NO: 413284 - DNA, 20 bp, Artificial Sequence
  Description of Artificial Sequence: Synthetic oligonucleotide
  Target: LAMA2; (+) strand; PAM type: YTN; PAM sequence: TTT
tgaggaacctccaaactgtt

SEQ ID NO: 413285 - DNA, 20 bp, Artificial Sequence
  Description of Artificial Sequence: Synthetic oligonucleotide
  Target: LAMA2; (+) strand; PAM type: YTN; PAM sequence: TTT
gaggaacctccaaactgttc

SEQ ID NO: 413286 - DNA, 20 bp, Artificial Sequence
  Description of Artificial Sequence: Synthetic oligonucleotide
  Target: LAMA2; (+) strand; PAM type: YTN; PAM sequence: TTG
aggaacctccaaactgttct

SEQ ID NO: 413287 - DNA, 20 bp, Artificial Sequence
  Description of Artificial Sequence: Synthetic oligonucleotide
  Target: LAMA2; (+) strand; PAM type: YTN; PAM sequence: CTC
caaactgttctgcatagcag

SEQ ID NO: 413288 - DNA, 20 bp, Artificial Sequence
  Description of Artificial Sequence: Synthetic oligonucleotide
  Target: LAMA2; (+) strand; PAM type: YTN; PAM sequence: CTG
ttctgcatagcagttgcact

SEQ ID NO: 413289 - DNA, 20 bp, Artificial Sequence
  Description of Artificial Sequence: Synthetic oligonucleotide
  Target: LAMA2; (+) strand; PAM type: YTN; PAM sequence: TTC
tgcatagcagttgcactagt

SEQ ID NO: 413290 - DNA, 20 bp, Artificial Sequence
  Description of Artificial Sequence: Synthetic oligonucleotide
  Target: LAMA2; (+) strand; PAM type: YTN; PAM sequence: CTG
catagcagttgcactagttt

SEQ ID NO: 413291 - DNA, 20 bp, Artificial Sequence
  Description of Artificial Sequence: Synthetic oligonucleotide
  Target: LAMA2; (+) strand; PAM type: YTN; PAM sequence: TTG
cactagtttacgttcccacc

SEQ ID NO: 413292 - DNA, 20 bp, Artificial Sequence
  Description of Artificial Sequence: Synthetic oligonucleotide
  Target: LAMA2; (+) strand; PAM type: YTN; PAM sequence: CTA
gtttacgttcccaccaacag

SEQ ID NO: 413293 - DNA, 20 bp, Artificial Sequence
  Description of Artificial Sequence: Synthetic oligonucleotide
  Target: LAMA2; (+) strand; PAM type: YTN; PAM sequence: TTT
acgttcccaccaacagtgta

SEQ ID NO: 413294 - DNA, 20 bp, Artificial Sequence
  Description of Artificial Sequence: Synthetic oligonucleotide
  Target: LAMA2; (+) strand; PAM type: YTN; PAM sequence: TTA
cgttcccaccaacagtgtac

SEQ ID NO: 413295 - DNA, 20 bp, Artificial Sequence
  Description of Artificial Sequence: Synthetic oligonucleotide
  Target: LAMA2; (+) strand; PAM type: YTN; PAM sequence: TTC
ccaccaacagtgtacaaggg

SEQ ID NO: 413296 - DNA, 20 bp, Artificial Sequence
  Description of Artificial Sequence: Synthetic oligonucleotide
  Target: LAMA2; (+) strand; PAM type: YTN; PAM sequence: TTC
tcttttctccacatcctcgt

SEQ ID NO: 413297 - DNA, 20 bp, Artificial Sequence
  Description of Artificial Sequence: Synthetic oligonucleotide
  Target: LAMA2; (+) strand; PAM type: YTN; PAM sequence: CTC
ttttctccacatcctcgtca

SEQ ID NO: 413298 - DNA, 20 bp, Artificial Sequence
  Description of Artificial Sequence: Synthetic oligonucleotide
  Target: LAMA2; (+) strand; PAM type: YTN; PAM sequence: CTT
ttctccacatcctcgtcagc

SEQ ID NO: 413299 - DNA, 20 bp, Artificial Sequence
  Description of Artificial Sequence: Synthetic oligonucleotide
  Target: LAMA2; (+) strand; PAM type: YTN; PAM sequence: TTT
tctccacatcctcgtcagca

SEQ ID NO: 413300 - DNA, 20 bp, Artificial Sequence
  Description of Artificial Sequence: Synthetic oligonucleotide
  Target: LAMA2; (+) strand; PAM type: YTN; PAM sequence: TTT
ctccacatcctcgtcagcat

SEQ ID NO: 413301 - DNA, 20 bp, Artificial Sequence
  Description of Artificial Sequence: Synthetic oligonucleotide
  Target: LAMA2; (+) strand; PAM type: YTN; PAM sequence: TTC
tccacatcctcgtcagcatt

SEQ ID NO: 413302 - DNA, 20 bp, Artificial Sequence
  Description of Artificial Sequence: Synthetic oligonucleotide
  Target: LAMA2; (+) strand; PAM type: YTN; PAM sequence: CTC
cacatcctcgtcagcatttg

SEQ ID NO: 413303 - DNA, 20 bp, Artificial Sequence
  Description of Artificial Sequence: Synthetic oligonucleotide
  Target: LAMA2; (+) strand; PAM type: YTN; PAM sequence: CTC
gtcagcatttgttattgcct

SEQ ID NO: 413304 - DNA, 20 bp, Artificial Sequence
  Description of Artificial Sequence: Synthetic oligonucleotide
  Target: LAMA2; (+) strand; PAM type: YTN; PAM sequence: TTT
gttattgcctgtcttttgga

SEQ ID NO: 413305 - DNA, 20 bp, Artificial Sequence
  Description of Artificial Sequence: Synthetic oligonucleotide
  Target: LAMA2; (+) strand; PAM type: YTN; PAM sequence: TTG
ttattgcctgtcttttggat

SEQ ID NO: 413306 - DNA, 20 bp, Artificial Sequence
  Description of Artificial Sequence: Synthetic oligonucleotide
  Target: LAMA2; (+) strand; PAM type: YTN; PAM sequence: TTA
ttgcctgtcttttggataaa

SEQ ID NO: 413307 - DNA, 20 bp, Artificial Sequence
  Description of Artificial Sequence: Synthetic oligonucleotide
  Target: LAMA2; (+) strand; PAM type: YTN; PAM sequence: TTG
cctgtcttttggataaaagc

SEQ ID NO: 413308 - DNA, 20 bp, Artificial Sequence
  Description of Artificial Sequence: Synthetic oligonucleotide
  Target: LAMA2; (+) strand; PAM type: YTN; PAM sequence: CTG
tcttttggataaaagccatt

SEQ ID NO: 413309 - DNA, 20 bp, Artificial Sequence
  Description of Artificial Sequence: Synthetic oligonucleotide
  Target: LAMA2; (+) strand; PAM type: YTN; PAM sequence: CTT
ttggataaaagccattttaa

SEQ ID NO: 413310 - DNA, 20 bp, Artificial Sequence
  Description of Artificial Sequence: Synthetic oligonucleotide
  Target: LAMA2; (+) strand; PAM type: YTN; PAM sequence: TTT
tggataaaagccattttaac

SEQ ID NO: 413311 - DNA, 20 bp, Artificial Sequence
  Description of Artificial Sequence: Synthetic oligonucleotide
  Target: LAMA2; (+) strand; PAM type: YTN; PAM sequence: TTT
ggataaaagccattttaact

SEQ ID NO: 413312 - DNA, 20 bp, Artificial Sequence
  Description of Artificial Sequence: Synthetic oligonucleotide
  Target: LAMA2; (+) strand; PAM type: YTN; PAM sequence: TTG
gataaaagccattttaactt

SEQ ID NO: 413313 - DNA, 20 bp, Artificial Sequence
  Description of Artificial Sequence: Synthetic oligonucleotide
  Target: LAMA2; (+) strand; PAM type: YTN; PAM sequence: TTT
taacttgggtgagatgatag

SEQ ID NO: 413314 - DNA, 20 bp, Artificial Sequence
  Description of Artificial Sequence: Synthetic oligonucleotide
  Target: LAMA2; (+) strand; PAM type: YTN; PAM sequence: TTT
aacttgggtgagatgatagc

SEQ ID NO: 413315 - DNA, 20 bp, Artificial Sequence
  Description of Artificial Sequence: Synthetic oligonucleotide
  Target: LAMA2; (+) strand; PAM type: YTN; PAM sequence: TTA
acttgggtgagatgatagct

SEQ ID NO: 413316 - DNA, 20 bp, Artificial Sequence
  Description of Artificial Sequence: Synthetic oligonucleotide
  Target: LAMA2; (+) strand; PAM type: YTN; PAM sequence: CTT
gggtgagatgatagctcatt

SEQ ID NO: 413317 - DNA, 20 bp, Artificial Sequence
  Description of Artificial Sequence: Synthetic oligonucleotide
  Target: LAMA2; (+) strand; PAM type: YTN; PAM sequence: TTG
ggtgagatgatagctcattg

SEQ ID NO: 413318 - DNA, 20 bp, Artificial Sequence
  Description of Artificial Sequence: Synthetic oligonucleotide
  Target: LAMA2; (+) strand; PAM type: YTN; PAM sequence: CTC
attgtagttttgatttgcat

SEQ ID NO: 413319 - DNA, 20 bp, Artificial Sequence
  Description of Artificial Sequence: Synthetic oligonucleotide
  Target: LAMA2; (+) strand; PAM type: YTN; PAM sequence: TTG
tagttttgatttgcatttct

SEQ ID NO: 413320 - DNA, 20 bp, Artificial Sequence
  Description of Artificial Sequence: Synthetic oligonucleotide
  Target: LAMA2; (+) strand; PAM type: YTN; PAM sequence: TTT
tgatttgcatttctctgatg

SEQ ID NO: 413321 - DNA, 20 bp, Artificial Sequence
  Description of Artificial Sequence: Synthetic oligonucleotide
  Target: LAMA2; (+) strand; PAM type: YTN; PAM sequence: TTT
gatttgcatttctctgatga

SEQ ID NO: 413322 - DNA, 20 bp, Artificial Sequence
  Description of Artificial Sequence: Synthetic oligonucleotide
  Target: LAMA2; (+) strand; PAM type: YTN; PAM sequence: TTG
atttgcatttctctgatgat

SEQ ID NO: 413323 - DNA, 20 bp, Artificial Sequence
  Description of Artificial Sequence: Synthetic oligonucleotide
  Target: LAMA2; (+) strand; PAM type: YTN; PAM sequence: TTT
gcatttctctgatgatcagt

SEQ ID NO: 413324 - DNA, 20 bp, Artificial Sequence
  Description of Artificial Sequence: Synthetic oligonucleotide
  Target: LAMA2; (+) strand; PAM type: YTN; PAM sequence: TTG
catttctctgatgatcagtg

SEQ ID NO: 413325 - DNA, 20 bp, Artificial Sequence
  Description of Artificial Sequence: Synthetic oligonucleotide
  Target: LAMA2; (+) strand; PAM type: YTN; PAM sequence: TTT
ctctgatgatcagtgatgtt

SEQ ID NO: 413326 - DNA, 20 bp, Artificial Sequence
  Description of Artificial Sequence: Synthetic oligonucleotide
  Target: LAMA2; (+) strand; PAM type: YTN; PAM sequence: TTC
tctgatgatcagtgatgttg

SEQ ID NO: 413327 - DNA, 20 bp, Artificial Sequence
  Description of Artificial Sequence: Synthetic oligonucleotide
  Target: LAMA2; (+) strand; PAM type: YTN; PAM sequence: CTC
tgatgatcagtgatgttgag

SEQ ID NO: 413328 - DNA, 20 bp, Artificial Sequence
  Description of Artificial Sequence: Synthetic oligonucleotide
  Target: LAMA2; (+) strand; PAM type: YTN; PAM sequence: CTG
atgatcagtgatgttgagcc

SEQ ID NO: 413329 - DNA, 20 bp, Artificial Sequence
  Description of Artificial Sequence: Synthetic oligonucleotide
  Target: LAMA2; (+) strand; PAM type: YTN; PAM sequence: TTG
agccccttttgatatacctg

SEQ ID NO: 413330 - DNA, 20 bp, Artificial Sequence
  Description of Artificial Sequence: Synthetic oligonucleotide
  Target: LAMA2; (+) strand; PAM type: YTN; PAM sequence: CTT
ttgatatacctgtttttcat

SEQ ID NO: 413331 - DNA, 20 bp, Artificial Sequence
  Description of Artificial Sequence: Synthetic oligonucleotide
  Target: LAMA2; (+) strand; PAM type: YTN; PAM sequence: TTT
tgatatacctgtttttcatc

SEQ ID NO: 413332 - DNA, 20 bp, Artificial Sequence
  Description of Artificial Sequence: Synthetic oligonucleotide
  Target: LAMA2; (+) strand; PAM type: YTN; PAM sequence: TTT
gatatacctgtttttcatct

SEQ ID NO: 413333 - DNA, 20 bp, Artificial Sequence
  Description of Artificial Sequence: Synthetic oligonucleotide
  Target: LAMA2; (+) strand; PAM type: YTN; PAM sequence: TTG
atatacctgtttttcatctg

SEQ ID NO: 413334 - DNA, 20 bp, Artificial Sequence
  Description of Artificial Sequence: Synthetic oligonucleotide
  Target: LAMA2; (+) strand; PAM type: YTN; PAM sequence: CTG
tttttcatctgaatatcttc

SEQ ID NO: 413335 - DNA, 20 bp, Artificial Sequence
  Description of Artificial Sequence: Synthetic oligonucleotide
  Target: LAMA2; (+) strand; PAM type: YTN; PAM sequence: TTT
ttcatctgaatatcttcttt

SEQ ID NO: 413336 - DNA, 20 bp, Artificial Sequence
  Description of Artificial Sequence: Synthetic oligonucleotide
  Target: LAMA2; (+) strand; PAM type: YTN; PAM sequence: TTT
tcatctgaatatcttctttt

SEQ ID NO: 413337 - DNA, 20 bp, Artificial Sequence
  Description of Artificial Sequence: Synthetic oligonucleotide
  Target: LAMA2; (+) strand; PAM type: YTN; PAM sequence: TTT
catctgaatatcttcttttg

SEQ ID NO: 413338 - DNA, 20 bp, Artificial Sequence
  Description of Artificial Sequence: Synthetic oligonucleotide
  Target: LAMA2; (+) strand; PAM type: YTN; PAM sequence: TTC
atctgaatatcttcttttga

SEQ ID NO: 413339 - DNA, 20 bp, Artificial Sequence
  Description of Artificial Sequence: Synthetic oligonucleotide
  Target: LAMA2; (+) strand; PAM type: YTN; PAM sequence: CTG
aatatcttcttttgagaaat

SEQ ID NO: 413340 - DNA, 20 bp, Artificial Sequence
  Description of Artificial Sequence: Synthetic oligonucleotide
  Target: LAMA2; (+) strand; PAM type: YTN; PAM sequence: CTT
cttttgagaaatgtctatcc

SEQ ID NO: 413341 - DNA, 20 bp, Artificial Sequence
  Description of Artificial Sequence: Synthetic oligonucleotide
  Target: LAMA2; (+) strand; PAM type: YTN; PAM sequence: TTC
ttttgagaaatgtctatcca

SEQ ID NO: 413342 - DNA, 20 bp, Artificial Sequence
  Description of Artificial Sequence: Synthetic oligonucleotide
  Target: LAMA2; (+) strand; PAM type: YTN; PAM sequence: CTT
ttgagaaatgtctatccaaa

SEQ ID NO: 413343 - DNA, 20 bp, Artificial Sequence
  Description of Artificial Sequence: Synthetic oligonucleotide
  Target: LAMA2; (+) strand; PAM type: YTN; PAM sequence: TTT
tgagaaatgtctatccaaat

SEQ ID NO: 413344 - DNA, 20 bp, Artificial Sequence
  Description of Artificial Sequence: Synthetic oligonucleotide
  Target: LAMA2; (+) strand; PAM type: YTN; PAM sequence: TTT
gagaaatgtctatccaaatc

SEQ ID NO: 413345 - DNA, 20 bp, Artificial Sequence
  Description of Artificial Sequence: Synthetic oligonucleotide
  Target: LAMA2; (+) strand; PAM type: YTN; PAM sequence: TTG
agaaatgtctatccaaatct

SEQ ID NO: 413346 - DNA, 20 bp, Artificial Sequence
  Description of Artificial Sequence: Synthetic oligonucleotide
  Target: LAMA2; (+) strand; PAM type: YTN; PAM sequence: CTA
tccaaatcttgtacccattt

SEQ ID NO: 413347 - DNA, 20 bp, Artificial Sequence
  Description of Artificial Sequence: Synthetic oligonucleotide
  Target: LAMA2; (+) strand; PAM type: YTN; PAM sequence: CTT
gtacccatttttaaatagga

SEQ ID NO: 413348 - DNA, 20 bp, Artificial Sequence
  Description of Artificial Sequence: Synthetic oligonucleotide
  Target: LAMA2; (+) strand; PAM type: YTN; PAM sequence: TTG
tacccatttttaaataggat

SEQ ID NO: 413349 - DNA, 20 bp, Artificial Sequence
  Description of Artificial Sequence: Synthetic oligonucleotide
  Target: LAMA2; (+) strand; PAM type: YTN; PAM sequence: TTT
ttaaataggattattagatt

SEQ ID NO: 413350 - DNA, 20 bp, Artificial Sequence
  Description of Artificial Sequence: Synthetic oligonucleotide
  Target: LAMA2; (+) strand; PAM type: YTN; PAM sequence: TTT
taaataggattattagattt

SEQ ID NO: 413351 - DNA, 20 bp, Artificial Sequence
  Description of Artificial Sequence: Synthetic oligonucleotide
  Target: LAMA2; (+) strand; PAM type: YTN; PAM sequence: TTT
aaataggattattagatttt

SEQ ID NO: 413352 - DNA, 20 bp, Artificial Sequence
  Description of Artificial Sequence: Synthetic oligonucleotide
  Target: LAMA2; (+) strand; PAM type: YTN; PAM sequence: TTA
aataggattattagattttt

SEQ ID NO: 413353 - DNA, 20 bp, Artificial Sequence
  Description of Artificial Sequence: Synthetic oligonucleotide
  Target: LAMA2; (+) strand; PAM type: YTN; PAM sequence: TTA
ttagatttttttcctataga

SEQ ID NO: 413354 - DNA, 20 bp, Artificial Sequence
  Description of Artificial Sequence: Synthetic oligonucleotide
  Target: LAMA2; (+) strand; PAM type: YTN; PAM sequence: TTA
gatttttttcctatagaatt

SEQ ID NO: 413355 - DNA, 20 bp, Artificial Sequence
  Description of Artificial Sequence: Synthetic oligonucleotide
  Target: LAMA2; (+) strand; PAM type: YTN; PAM sequence: TTT
ttttcctatagaattgtttg

SEQ ID NO: 413356 - DNA, 20 bp, Artificial Sequence
  Description of Artificial Sequence: Synthetic oligonucleotide
  Target: LAMA2; (+) strand; PAM type: YTN; PAM sequence: TTT
tttcctatagaattgtttga

SEQ ID NO: 413357 - DNA, 20 bp, Artificial Sequence
  Description of Artificial Sequence: Synthetic oligonucleotide
  Target: LAMA2; (+) strand; PAM type: YTN; PAM sequence: TTT
ttcctatagaattgtttgaa

SEQ ID NO: 413358 - DNA, 20 bp, Artificial Sequence
  Description of Artificial Sequence: Synthetic oligonucleotide
  Target: LAMA2; (+) strand; PAM type: YTN; PAM sequence: TTT
tcctatagaattgtttgaat

SEQ ID NO: 413359 - DNA, 20 bp, Artificial Sequence
  Description of Artificial Sequence: Synthetic oligonucleotide
  Target: LAMA2; (+) strand; PAM type: YTN; PAM sequence: TTT
cctatagaattgtttgaatt

SEQ ID NO: 413360 - DNA, 20 bp, Artificial Sequence
  Description of Artificial Sequence: Synthetic oligonucleotide
  Target: LAMA2; (+) strand; PAM type: YTN; PAM sequence: TTC
ctatagaattgtttgaattc

SEQ ID NO: 413361 - DNA, 20 bp, Artificial Sequence
  Description of Artificial Sequence: Synthetic oligonucleotide
  Target: LAMA2; (+) strand; PAM type: YTN; PAM sequence: CTA
tagaattgtttgaattcctt

SEQ ID NO: 413362 - DNA, 20 bp, Artificial Sequence
  Description of Artificial Sequence: Synthetic oligonucleotide
  Target: LAMA2; (+) strand; PAM type: YTN; PAM sequence: TTG
tttgaattccttttatattc

SEQ ID NO: 413363 - DNA, 20 bp, Artificial Sequence
  Description of Artificial Sequence: Synthetic oligonucleotide
  Target: LAMA2; (+) strand; PAM type: YTN; PAM sequence: TTT
gaattccttttatattctgg

SEQ ID NO: 413364 - DNA, 20 bp, Artificial Sequence
  Description of Artificial Sequence: Synthetic oligonucleotide
  Target: LAMA2; (+) strand; PAM type: YTN; PAM sequence: TTG
aattccttttatattctggt

SEQ ID NO: 413365 - DNA, 20 bp, Artificial Sequence
  Description of Artificial Sequence: Synthetic oligonucleotide
  Target: LAMA2; (+) strand; PAM type: YTN; PAM sequence: TTC
cttttatattctggttatta

SEQ ID NO: 413366 - DNA, 20 bp, Artificial Sequence
  Description of Artificial Sequence: Synthetic oligonucleotide
  Target: LAMA2; (+) strand; PAM type: YTN; PAM sequence: CTT
ttatattctggttattaatc

SEQ ID NO: 413367 - DNA, 20 bp, Artificial Sequence
  Description of Artificial Sequence: Synthetic oligonucleotide
  Target: LAMA2; (+) strand; PAM type: YTN; PAM sequence: TTT
tatattctggttattaatcc

SEQ ID NO: 413368 - DNA, 20 bp, Artificial Sequence
  Description of Artificial Sequence: Synthetic oligonucleotide
  Target: LAMA2; (+) strand; PAM type: YTN; PAM sequence: TTT
atattctggttattaatccc

SEQ ID NO: 413369 - DNA, 20 bp, Artificial Sequence
  Description of Artificial Sequence: Synthetic oligonucleotide
  Target: LAMA2; (+) strand; PAM type: YTN; PAM sequence: TTA
tattctggttattaatccct

SEQ ID NO: 413370 - DNA, 20 bp, Artificial Sequence
  Description of Artificial Sequence: Synthetic oligonucleotide
  Target: LAMA2; (+) strand; PAM type: YTN; PAM sequence: TTC
tggttattaatcccttctca

SEQ ID NO: 413371 - DNA, 20 bp, Artificial Sequence
  Description of Artificial Sequence: Synthetic oligonucleotide
  Target: LAMA2; (+) strand; PAM type: YTN; PAM sequence: CTG
gttattaatcccttctcaga

SEQ ID NO: 413372 - DNA, 20 bp, Artificial Sequence
  Description of Artificial Sequence: Synthetic oligonucleotide
  Target: LAMA2; (+) strand; PAM type: YTN; PAM sequence: TTA
ttaatcccttctcagatggg

SEQ ID NO: 413373 - DNA, 20 bp, Artificial Sequence
  Description of Artificial Sequence: Synthetic oligonucleotide
  Target: LAMA2; (+) strand; PAM type: YTN; PAM sequence: TTA
atcccttctcagatgggtag

SEQ ID NO: 413374 - DNA, 20 bp, Artificial Sequence
  Description of Artificial Sequence: Synthetic oligonucleotide
  Target: LAMA2; (+) strand; PAM type: YTN; PAM sequence: CTT
ctcagatgggtagtttgcaa

SEQ ID NO: 413375 - DNA, 20 bp, Artificial Sequence
  Description of Artificial Sequence: Synthetic oligonucleotide
  Target: LAMA2; (+) strand; PAM type: YTN; PAM sequence: TTC
tcagatgggtagtttgcaaa

SEQ ID NO: 413376 - DNA, 20 bp, Artificial Sequence
  Description of Artificial Sequence: Synthetic oligonucleotide
  Target: LAMA2; (+) strand; PAM type: YTN; PAM sequence: CTC
agatgggtagtttgcaaata

SEQ ID NO: 413377 - DNA, 20 bp, Artificial Sequence
  Description of Artificial Sequence: Synthetic oligonucleotide
  Target: LAMA2; (+) strand; PAM type: YTN; PAM sequence: TTT
gcaaatattttatcccattc

SEQ ID NO: 413378 - DNA, 20 bp, Artificial Sequence
  Description of Artificial Sequence: Synthetic oligonucleotide
  Target: LAMA2; (+) strand; PAM type: YTN; PAM sequence: TTG
caaatattttatcccattct

SEQ ID NO: 413379 - DNA, 20 bp, Artificial Sequence
  Description of Artificial Sequence: Synthetic oligonucleotide
  Target: LAMA2; (+) strand; PAM type: YTN; PAM sequence: TTT
tatcccattctgtgggttgt

SEQ ID NO: 413380 - DNA, 20 bp, Artificial Sequence
  Description of Artificial Sequence: Synthetic oligonucleotide
  Target: LAMA2; (+) strand; PAM type: YTN; PAM sequence: TTT
atcccattctgtgggttgtc

SEQ ID NO: 413381 - DNA, 20 bp, Artificial Sequence
  Description of Artificial Sequence: Synthetic oligonucleotide
  Target: LAMA2; (+) strand; PAM type: YTN; PAM sequence: TTA
tcccattctgtgggttgtca

SEQ ID NO: 413382 - DNA, 20 bp, Artificial Sequence
  Description of Artificial Sequence: Synthetic oligonucleotide
  Target: LAMA2; (+) strand; PAM type: YTN; PAM sequence: TTC
tgtgggttgtcacttcactt

SEQ ID NO: 413383 - DNA, 20 bp, Artificial Sequence
  Description of Artificial Sequence: Synthetic oligonucleotide
  Target: LAMA2; (+) strand; PAM type: YTN; PAM sequence: CTG
tgggttgtcacttcactttg

SEQ ID NO: 413384 - DNA, 20 bp, Artificial Sequence
  Description of Artificial Sequence: Synthetic oligonucleotide
  Target: LAMA2; (+) strand; PAM type: YTN; PAM sequence: TTG
tcacttcactttgttgattg

SEQ ID NO: 413385 - DNA, 20 bp, Artificial Sequence
  Description of Artificial Sequence: Synthetic oligonucleotide
  Target: LAMA2; (+) strand; PAM type: YTN; PAM sequence: CTT
cactttgttgattgtttact

SEQ ID NO: 413386 - DNA, 20 bp, Artificial Sequence
  Description of Artificial Sequence: Synthetic oligonucleotide
  Target: LAMA2; (+) strand; PAM type: YTN; PAM sequence: TTC
actttgttgattgtttactt

SEQ ID NO: 413387 - DNA, 20 bp, Artificial Sequence
  Description of Artificial Sequence: Synthetic oligonucleotide
  Target: LAMA2; (+) strand; PAM type: YTN; PAM sequence: CTT
tgttgattgtttactttgct

SEQ ID NO: 413388 - DNA, 20 bp, Artificial Sequence
  Description of Artificial Sequence: Synthetic oligonucleotide
  Target: LAMA2; (+) strand; PAM type: YTN; PAM sequence: TTT
gttgattgtttactttgctg

SEQ ID NO: 413389 - DNA, 20 bp, Artificial Sequence
  Description of Artificial Sequence: Synthetic oligonucleotide
  Target: LAMA2; (+) strand; PAM type: YTN; PAM sequence: TTG
ttgattgtttactttgctgt

SEQ ID NO: 413390 - DNA, 20 bp, Artificial Sequence
  Description of Artificial Sequence: Synthetic oligonucleotide
  Target: LAMA2; (+) strand; PAM type: YTN; PAM sequence: TTG
attgtttactttgctgtgca

SEQ ID NO: 413391 - DNA, 20 bp, Artificial Sequence
  Description of Artificial Sequence: Synthetic oligonucleotide
  Target: LAMA2; (+) strand; PAM type: YTN; PAM sequence: TTG
tttactttgctgtgcagaag

SEQ ID NO: 413392 - DNA, 20 bp, Artificial Sequence
  Description of Artificial Sequence: Synthetic oligonucleotide
  Target: LAMA2; (+) strand; PAM type: YTN; PAM sequence: TTT
actttgctgtgcagaagctt

SEQ ID NO: 413393 - DNA, 20 bp, Artificial Sequence
  Description of Artificial Sequence: Synthetic oligonucleotide
  Target: LAMA2; (+) strand; PAM type: YTN; PAM sequence: TTA
ctttgctgtgcagaagcttt

SEQ ID NO: 413394 - DNA, 20 bp, Artificial Sequence
  Description of Artificial Sequence: Synthetic oligonucleotide
  Target: LAMA2; (+) strand; PAM type: YTN; PAM sequence: CTT
tgctgtgcagaagcttttta

SEQ ID NO: 413395 - DNA, 20 bp, Artificial Sequence
  Description of Artificial Sequence: Synthetic oligonucleotide
  Target: LAMA2; (+) strand; PAM type: YTN; PAM sequence: TTT
gctgtgcagaagctttttaa

SEQ ID NO: 413396 - DNA, 20 bp, Artificial Sequence
  Description of Artificial Sequence: Synthetic oligonucleotide
  Target: LAMA2; (+) strand; PAM type: YTN; PAM sequence: TTG
ctgtgcagaagctttttaac

SEQ ID NO: 413397 - DNA, 20 bp, Artificial Sequence
  Description of Artificial Sequence: Synthetic oligonucleotide
  Target: LAMA2; (+) strand; PAM type: YTN; PAM sequence: CTG
tgcagaagctttttaacttg

SEQ ID NO: 413398 - DNA, 20 bp, Artificial Sequence
  Description of Artificial Sequence: Synthetic oligonucleotide
  Target: LAMA2; (+) strand; PAM type: YTN; PAM sequence: CTT
tttaacttgatgtgatccca

SEQ ID NO: 413399 - DNA, 20 bp, Artificial Sequence
  Description of Artificial Sequence: Synthetic oligonucleotide
  Target: LAMA2; (+) strand; PAM type: YTN; PAM sequence: TTT
ttaacttgatgtgatcccat

SEQ ID NO: 413400 - DNA, 20 bp, Artificial Sequence
  Description of Artificial Sequence: Synthetic oligonucleotide
  Target: LAMA2; (+) strand; PAM type: YTN; PAM sequence: TTT
taacttgatgtgatcccatt

SEQ ID NO: 413401 - DNA, 20 bp, Artificial Sequence
  Description of Artificial Sequence: Synthetic oligonucleotide
  Target: LAMA2; (+) strand; PAM type: YTN; PAM sequence: TTT
aacttgatgtgatcccattt

SEQ ID NO: 413402 - DNA, 20 bp, Artificial Sequence
  Description of Artificial Sequence: Synthetic oligonucleotide
  Target: LAMA2; (+) strand; PAM type: YTN; PAM sequence: TTA
acttgatgtgatcccatttg

SEQ ID NO: 413403 - DNA, 20 bp, Artificial Sequence
  Description of Artificial Sequence: Synthetic oligonucleotide
  Target: LAMA2; (+) strand; PAM type: YTN; PAM sequence: CTT
gatgtgatcccatttgtcta

SEQ ID NO: 413404 - DNA, 20 bp, Artificial Sequence
  Description of Artificial Sequence: Synthetic oligonucleotide
  Target: LAMA2; (+) strand; PAM type: YTN; PAM sequence: TTG
atgtgatcccatttgtctat

SEQ ID NO: 413405 - DNA, 20 bp, Artificial Sequence
  Description of Artificial Sequence: Synthetic oligonucleotide
  Target: LAMA2; (+) strand; PAM type: YTN; PAM sequence: TTT
gtctatttttactttggttg

SEQ ID NO: 413406 - DNA, 20 bp, Artificial Sequence
  Description of Artificial Sequence: Synthetic oligonucleotide
  Target: LAMA2; (+) strand; PAM type: YTN; PAM sequence: TTG
tctatttttactttggttgc

SEQ ID NO: 413407 - DNA, 20 bp, Artificial Sequence
  Description of Artificial Sequence: Synthetic oligonucleotide
  Target: LAMA2; (+) strand; PAM type: YTN; PAM sequence: CTA
tttttactttggttgcctgt

SEQ ID NO: 413408 - DNA, 20 bp, Artificial Sequence
  Description of Artificial Sequence: Synthetic oligonucleotide
  Target: LAMA2; (+) strand; PAM type: YTN; PAM sequence: TTT
ttactttggttgcctgtgct

SEQ ID NO: 413409 - DNA, 20 bp, Artificial Sequence
  Description of Artificial Sequence: Synthetic oligonucleotide
  Target: LAMA2; (+) strand; PAM type: YTN; PAM sequence: TTT
tactttggttgcctgtgctt

SEQ ID NO: 413410 - DNA, 20 bp, Artificial Sequence
  Description of Artificial Sequence: Synthetic oligonucleotide
  Target: LAMA2; (+) strand; PAM type: YTN; PAM sequence: TTT
actttggttgcctgtgcttg

SEQ ID NO: 413411 - DNA, 20 bp, Artificial Sequence
  Description of Artificial Sequence: Synthetic oligonucleotide
  Target: LAMA2; (+) strand; PAM type: YTN; PAM sequence: TTA
ctttggttgcctgtgcttgt

SEQ ID NO: 413412 - DNA, 20 bp, Artificial Sequence
  Description of Artificial Sequence: Synthetic oligonucleotide
  Target: LAMA2; (+) strand; PAM type: YTN; PAM sequence: CTT
tggttgcctgtgcttgtggg

SEQ ID NO: 413413 - DNA, 20 bp, Artificial Sequence
  Description of Artificial Sequence: Synthetic oligonucleotide
  Target: LAMA2; (+) strand; PAM type: YTN; PAM sequence: TTT
ggttgcctgtgcttgtgggt

SEQ ID NO: 413414 - DNA, 20 bp, Artificial Sequence
  Description of Artificial Sequence: Synthetic oligonucleotide
  Target: LAMA2; (+) strand; PAM type: YTN; PAM sequence: TTG
gttgcctgtgcttgtgggta

SEQ ID NO: 413415 - DNA, 20 bp, Artificial Sequence
  Description of Artificial Sequence: Synthetic oligonucleotide
  Target: LAMA2; (+) strand; PAM type: YTN; PAM sequence: TTG
cctgtgcttgtgggtattac

SEQ ID NO: 413416 - DNA, 20 bp, Artificial Sequence
  Description of Artificial Sequence: Synthetic oligonucleotide
  Target: LAMA2; (+) strand; PAM type: YTN; PAM sequence: CTG
tgcttgtgggtattactcag

SEQ ID NO: 413417 - DNA, 20 bp, Artificial Sequence
  Description of Artificial Sequence: Synthetic oligonucleotide
  Target: LAMA2; (+) strand; PAM type: YTN; PAM sequence: CTT
gtgggtattactcaggaagt

SEQ ID NO: 413418 - DNA, 20 bp, Artificial Sequence
  Description of Artificial Sequence: Synthetic oligonucleotide
  Target: LAMA2; (+) strand; PAM type: YTN; PAM sequence: TTG
tgggtattactcaggaagtc

SEQ ID NO: 413419 - DNA, 20 bp, Artificial Sequence
  Description of Artificial Sequence: Synthetic oligonucleotide
  Target: LAMA2; (+) strand; PAM type: YTN; PAM sequence: TTA
ctcaggaagtctttgcccat

SEQ ID NO: 413420 - DNA, 20 bp, Artificial Sequence
  Description of Artificial Sequence: Synthetic oligonucleotide
  Target: LAMA2; (+) strand; PAM type: YTN; PAM sequence: CTC
aggaagtctttgcccatttc

SEQ ID NO: 413421 - DNA, 20 bp, Artificial Sequence
  Description of Artificial Sequence: Synthetic oligonucleotide
  Target: LAMA2; (+) strand; PAM type: YTN; PAM sequence: CTT
tgcccatttcaatgtcctgg

SEQ ID NO: 413422 - DNA, 20 bp, Artificial Sequence
  Description of Artificial Sequence: Synthetic oligonucleotide
  Target: LAMA2; (+) strand; PAM type: YTN; PAM sequence: TTT
gcccatttcaatgtcctgga

SEQ ID NO: 413423 - DNA, 20 bp, Artificial Sequence
  Description of Artificial Sequence: Synthetic oligonucleotide
  Target: LAMA2; (+) strand; PAM type: YTN; PAM sequence: TTG
cccatttcaatgtcctggag

SEQ ID NO: 413424 - DNA, 20 bp, Artificial Sequence
  Description of Artificial Sequence: Synthetic oligonucleotide
  Target: LAMA2; (+) strand; PAM type: YTN; PAM sequence: TTT
caatgtcctggagaatttcc

SEQ ID NO: 413425 - DNA, 20 bp, Artificial Sequence
  Description of Artificial Sequence: Synthetic oligonucleotide
  Target: LAMA2; (+) strand; PAM type: YTN; PAM sequence: TTC
aatgtcctggagaatttccc

SEQ ID NO: 413426 - DNA, 20 bp, Artificial Sequence
  Description of Artificial Sequence: Synthetic oligonucleotide
  Target: LAMA2; (+) strand; PAM type: YTN; PAM sequence: CTG
gagaatttccccaatgtttt

SEQ ID NO: 413427 - DNA, 20 bp, Artificial Sequence
  Description of Artificial Sequence: Synthetic oligonucleotide
  Target: LAMA2; (+) strand; PAM type: YTN; PAM sequence: TTT
ccccaatgttttattgtaat

SEQ ID NO: 413428 - DNA, 20 bp, Artificial Sequence
  Description of Artificial Sequence: Synthetic oligonucleotide
  Target: LAMA2; (+) strand; PAM type: YTN; PAM sequence: TTC
cccaatgttttattgtaata

SEQ ID NO: 413429 - DNA, 20 bp, Artificial Sequence
  Description of Artificial Sequence: Synthetic oligonucleotide
  Target: LAMA2; (+) strand; PAM type: YTN; PAM sequence: TTT
tattgtaatagtttcatagt

SEQ ID NO: 413430 - DNA, 20 bp, Artificial Sequence
  Description of Artificial Sequence: Synthetic oligonucleotide
  Target: LAMA2; (+) strand; PAM type: YTN; PAM sequence: TTT
attgtaatagtttcatagtt

SEQ ID NO: 413431 - DNA, 20 bp, Artificial Sequence
  Description of Artificial Sequence: Synthetic oligonucleotide
  Target: LAMA2; (+) strand; PAM type: YTN; PAM sequence: TTA
ttgtaatagtttcatagttg

SEQ ID NO: 413432 - DNA, 20 bp, Artificial Sequence
  Description of Artificial Sequence: Synthetic oligonucleotide
  Target: LAMA2; (+) strand; PAM type: YTN; PAM sequence: TTG
taatagtttcatagttggat

SEQ ID NO: 413433 - DNA, 20 bp, Artificial Sequence
  Description of Artificial Sequence: Synthetic oligonucleotide
  Target: LAMA2; (+) strand; PAM type: YTN; PAM sequence: TTT
catagttggatctcttagat

SEQ ID NO: 413434 - DNA, 20 bp, Artificial Sequence
  Description of Artificial Sequence: Synthetic oligonucleotide
  Target: LAMA2; (+) strand; PAM type: YTN; PAM sequence: TTC
atagttggatctcttagatt

SEQ ID NO: 413435 - DNA, 20 bp, Artificial Sequence
  Description of Artificial Sequence: Synthetic oligonucleotide
  Target: LAMA2; (+) strand; PAM type: YTN; PAM sequence: TTG
gatctcttagattcaagtct

SEQ ID NO: 413436 - DNA, 20 bp, Artificial Sequence
  Description of Artificial Sequence: Synthetic oligonucleotide
  Target: LAMA2; (+) strand; PAM type: YTN; PAM sequence: CTC
ttagattcaagtctctaatc

SEQ ID NO: 413437 - DNA, 20 bp, Artificial Sequence
  Description of Artificial Sequence: Synthetic oligonucleotide
  Target: LAMA2; (+) strand; PAM type: YTN; PAM sequence: CTT
agattcaagtctctaatcca

SEQ ID NO: 413438 - DNA, 20 bp, Artificial Sequence
  Description of Artificial Sequence: Synthetic oligonucleotide
  Target: LAMA2; (+) strand; PAM type: YTN; PAM sequence: TTA
gattcaagtctctaatccac

SEQ ID NO: 413439 - DNA, 20 bp, Artificial Sequence
  Description of Artificial Sequence: Synthetic oligonucleotide
  Target: LAMA2; (+) strand; PAM type: YTN; PAM sequence: TTC
aagtctctaatccactttga

SEQ ID NO: 413440 - DNA, 20 bp, Artificial Sequence
  Description of Artificial Sequence: Synthetic oligonucleotide
  Target: LAMA2; (+) strand; PAM type: YTN; PAM sequence: CTC
taatccactttgatttgatt

SEQ ID NO: 413441 - DNA, 20 bp, Artificial Sequence
  Description of Artificial Sequence: Synthetic oligonucleotide
  Target: LAMA2; (+) strand; PAM type: YTN; PAM sequence: CTA
atccactttgatttgatttt

SEQ ID NO: 413442 - DNA, 20 bp, Artificial Sequence
  Description of Artificial Sequence: Synthetic oligonucleotide
  Target: LAMA2; (+) strand; PAM type: YTN; PAM sequence: CTT
tgatttgatttttgtatatg

SEQ ID NO: 413443 - DNA, 20 bp, Artificial Sequence
  Description of Artificial Sequence: Synthetic oligonucleotide
  Target: LAMA2; (+) strand; PAM type: YTN; PAM sequence: TTT
gatttgatttttgtatatgg

SEQ ID NO: 413444 - DNA, 20 bp, Artificial Sequence
  Description of Artificial Sequence: Synthetic oligonucleotide
  Target: LAMA2; (+) strand; PAM type: YTN; PAM sequence: TTG
atttgatttttgtatatggc

SEQ ID NO: 413445 - DNA, 20 bp, Artificial Sequence
  Description of Artificial Sequence: Synthetic oligonucleotide
  Target: LAMA2; (+) strand; PAM type: YTN; PAM sequence: TTT
gatttttgtatatggcgaga

SEQ ID NO: 413446 - DNA, 20 bp, Artificial Sequence
  Description of Artificial Sequence: Synthetic oligonucleotide
  Target: LAMA2; (+) strand; PAM type: YTN; PAM sequence: TTG
atttttgtatatggcgagag

SEQ ID NO: 413447 - DNA, 20 bp, Artificial Sequence
  Description of Artificial Sequence: Synthetic oligonucleotide
  Target: LAMA2; (+) strand; PAM type: YTN; PAM sequence: TTT
ttgtatatggcgagagatag

SEQ ID NO: 413448 - DNA, 20 bp, Artificial Sequence
  Description of Artificial Sequence: Synthetic oligonucleotide
  Target: LAMA2; (+) strand; PAM type: YTN; PAM sequence: TTT
tgtatatggcgagagatagg

SEQ ID NO: 413449 - DNA, 20 bp, Artificial Sequence
  Description of Artificial Sequence: Synthetic oligonucleotide
  Target: LAMA2; (+) strand; PAM type: YTN; PAM sequence: TTT
gtatatggcgagagataggg

SEQ ID NO: 413450 - DNA, 20 bp, Artificial Sequence
  Description of Artificial Sequence: Synthetic oligonucleotide
  Target: LAMA2; (+) strand; PAM type: YTN; PAM sequence: TTG
tatatggcgagagataggga

SEQ ID NO: 413451 - DNA, 20 bp, Artificial Sequence
  Description of Artificial Sequence: Synthetic oligonucleotide
  Target: LAMA2; (+) strand; PAM type: YTN; PAM sequence: CTA
gtttcattcttccgcatatg

SEQ ID NO: 413452 - DNA, 20 bp, Artificial Sequence
  Description of Artificial Sequence: Synthetic oligonucleotide
  Target: LAMA2; (+) strand; PAM type: YTN; PAM sequence: TTT
cattcttccgcatatgaata

SEQ ID NO: 413453 - DNA, 20 bp, Artificial Sequence
  Description of Artificial Sequence: Synthetic oligonucleotide
  Target: LAMA2; (+) strand; PAM type: YTN; PAM sequence: TTC
attcttccgcatatgaatat

SEQ ID NO: 413454 - DNA, 20 bp, Artificial Sequence
  Description of Artificial Sequence: Synthetic oligonucleotide
  Target: LAMA2; (+) strand; PAM type: YTN; PAM sequence: TTC
ttccgcatatgaatatccag

SEQ ID NO: 413455 - DNA, 20 bp, Artificial Sequence
  Description of Artificial Sequence: Synthetic oligonucleotide
  Target: LAMA2; (+) strand; PAM type: YTN; PAM sequence: CTT
ccgcatatgaatatccagtt

SEQ ID NO: 413456 - DNA, 20 bp, Artificial Sequence
  Description of Artificial Sequence: Synthetic oligonucleotide
  Target: LAMA2; (+) strand; PAM type: YTN; PAM sequence: TTC
cgcatatgaatatccagttt

SEQ ID NO: 413457 - DNA, 20 bp, Artificial Sequence
  Description of Artificial Sequence: Synthetic oligonucleotide
  Target: LAMA2; (+) strand; PAM type: YTN; PAM sequence: TTT
tccctgcaccatttattgaa

SEQ ID NO: 413458 - DNA, 20 bp, Artificial Sequence
  Description of Artificial Sequence: Synthetic oligonucleotide
  Target: LAMA2; (+) strand; PAM type: YTN; PAM sequence: TTT
ccctgcaccatttattgaag

SEQ ID NO: 413459 - DNA, 20 bp, Artificial Sequence
  Description of Artificial Sequence: Synthetic oligonucleotide
  Target: LAMA2; (+) strand; PAM type: YTN; PAM sequence: TTC
cctgcaccatttattgaaga

SEQ ID NO: 413460 - DNA, 20 bp, Artificial Sequence
  Description of Artificial Sequence: Synthetic oligonucleotide
  Target: LAMA2; (+) strand; PAM type: YTN; PAM sequence: CTG
caccatttattgaagagact

SEQ ID NO: 413461 - DNA, 20 bp, Artificial Sequence
  Description of Artificial Sequence: Synthetic oligonucleotide
  Target: LAMA2; (+) strand; PAM type: YTN; PAM sequence: TTT
attgaagagactgtcctttc

SEQ ID NO: 413462 - DNA, 20 bp, Artificial Sequence
  Description of Artificial Sequence: Synthetic oligonucleotide
  Target: LAMA2; (+) strand; PAM type: YTN; PAM sequence: TTA
ttgaagagactgtcctttcc

SEQ ID NO: 413463 - DNA, 20 bp, Artificial Sequence
  Description of Artificial Sequence: Synthetic oligonucleotide
  Target: LAMA2; (+) strand; PAM type: YTN; PAM sequence: TTG
aagagactgtcctttcccta

SEQ ID NO: 413464 - DNA, 20 bp, Artificial Sequence
  Description of Artificial Sequence: Synthetic oligonucleotide
  Target: LAMA2; (+) strand; PAM type: YTN; PAM sequence: CTG
tcctttccctaatgtatgtt

SEQ ID NO: 413465 - DNA, 20 bp, Artificial Sequence
  Description of Artificial Sequence: Synthetic oligonucleotide
  Target: LAMA2; (+) strand; PAM type: YTN; PAM sequence: CTT
tccctaatgtatgttcttag

SEQ ID NO: 413466 - DNA, 20 bp, Artificial Sequence
  Description of Artificial Sequence: Synthetic oligonucleotide
  Target: LAMA2; (+) strand; PAM type: YTN; PAM sequence: TTT
ccctaatgtatgttcttaga

SEQ ID NO: 413467 - DNA, 20 bp, Artificial Sequence
  Description of Artificial Sequence: Synthetic oligonucleotide
  Target: LAMA2; (+) strand; PAM type: YTN; PAM sequence: TTC
cctaatgtatgttcttagaa

SEQ ID NO: 413468 - DNA, 20 bp, Artificial Sequence
  Description of Artificial Sequence: Synthetic oligonucleotide
  Target: LAMA2; (+) strand; PAM type: YTN; PAM sequence: CTA
atgtatgttcttagaacctt

SEQ ID NO: 413469 - DNA, 20 bp, Artificial Sequence
  Description of Artificial Sequence: Synthetic oligonucleotide
  Target: LAMA2; (+) strand; PAM type: YTN; PAM sequence: TTC
ttagaacctttatggaaaat

SEQ ID NO: 413470 - DNA, 20 bp, Artificial Sequence
  Description of Artificial Sequence: Synthetic oligonucleotide
  Target: LAMA2; (+) strand; PAM type: YTN; PAM sequence: CTT
agaacctttatggaaaatga

SEQ ID NO: 413471 - DNA, 20 bp, Artificial Sequence
  Description of Artificial Sequence: Synthetic oligonucleotide
  Target: LAMA2; (+) strand; PAM type: YTN; PAM sequence: TTA
gaacctttatggaaaatgag

SEQ ID NO: 413472 - DNA, 20 bp, Artificial Sequence
  Description of Artificial Sequence: Synthetic oligonucleotide
  Target: LAMA2; (+) strand; PAM type: YTN; PAM sequence: CTT
tatggaaaatgagttcactg

SEQ ID NO: 413473 - DNA, 20 bp, Artificial Sequence
  Description of Artificial Sequence: Synthetic oligonucleotide
  Target: LAMA2; (+) strand; PAM type: YTN; PAM sequence: TTT
atggaaaatgagttcactgt

SEQ ID NO: 413474 - DNA, 20 bp, Artificial Sequence
  Description of Artificial Sequence: Synthetic oligonucleotide
  Target: LAMA2; (+) strand; PAM type: YTN; PAM sequence: TTA
tggaaaatgagttcactgta

SEQ ID NO: 413475 - DNA, 20 bp, Artificial Sequence
  Description of Artificial Sequence: Synthetic oligonucleotide
  Target: LAMA2; (+) strand; PAM type: YTN; PAM sequence: TTC
actgtagatgtatggattta

SEQ ID NO: 413476 - DNA, 20 bp, Artificial Sequence
  Description of Artificial Sequence: Synthetic oligonucleotide
  Target: LAMA2; (+) strand; PAM type: YTN; PAM sequence: CTG
tagatgtatggatttatttc

SEQ ID NO: 413477 - DNA, 20 bp, Artificial Sequence
  Description of Artificial Sequence: Synthetic oligonucleotide
  Target: LAMA2; (+) strand; PAM type: YTN; PAM sequence: TTT
atttctggcttctctatcct

SEQ ID NO: 413478 - DNA, 20 bp, Artificial Sequence
  Description of Artificial Sequence: Synthetic oligonucleotide
  Target: LAMA2; (+) strand; PAM type: YTN; PAM sequence: TTA
tttctggcttctctatcctg

SEQ ID NO: 413479 - DNA, 20 bp, Artificial Sequence
  Description of Artificial Sequence: Synthetic oligonucleotide
  Target: LAMA2; (+) strand; PAM type: YTN; PAM sequence: TTT
ctggcttctctatcctgttc

SEQ ID NO: 413480 - DNA, 20 bp, Artificial Sequence
  Description of Artificial Sequence: Synthetic oligonucleotide
  Target: LAMA2; (+) strand; PAM type: YTN; PAM sequence: TTC
tggcttctctatcctgttcc

SEQ ID NO: 413481 - DNA, 20 bp, Artificial Sequence
  Description of Artificial Sequence: Synthetic oligonucleotide
  Target: LAMA2; (+) strand; PAM type: YTN; PAM sequence: CTG
gcttctctatcctgttccac

SEQ ID NO: 413482 - DNA, 20 bp, Artificial Sequence
  Description of Artificial Sequence: Synthetic oligonucleotide
  Target: LAMA2; (+) strand; PAM type: YTN; PAM sequence: CTT
ctctatcctgttccactggt

SEQ ID NO: 413483 - DNA, 20 bp, Artificial Sequence
  Description of Artificial Sequence: Synthetic oligonucleotide
  Target: LAMA2; (+) strand; PAM type: YTN; PAM sequence: TTC
tctatcctgttccactggtc

SEQ ID NO: 413484 - DNA, 20 bp, Artificial Sequence
  Description of Artificial Sequence: Synthetic oligonucleotide
  Target: LAMA2; (+) strand; PAM type: YTN; PAM sequence: CTC
tatcctgttccactggtcta

SEQ ID NO: 413485 - DNA, 20 bp, Artificial Sequence
  Description of Artificial Sequence: Synthetic oligonucleotide
  Target: LAMA2; (+) strand; PAM type: YTN; PAM sequence: CTA
tcctgttccactggtctatg

SEQ ID NO: 413486 - DNA, 20 bp, Artificial Sequence
  Description of Artificial Sequence: Synthetic oligonucleotide
  Target: LAMA2; (+) strand; PAM type: YTN; PAM sequence: CTG
ttccactggtctatgtgcct

SEQ ID NO: 413487 - DNA, 20 bp, Artificial Sequence
  Description of Artificial Sequence: Synthetic oligonucleotide
  Target: LAMA2; (+) strand; PAM type: YTN; PAM sequence: TTC
cactggtctatgtgcctatt

SEQ ID NO: 413488 - DNA, 20 bp, Artificial Sequence
  Description of Artificial Sequence: Synthetic oligonucleotide
  Target: LAMA2; (+) strand; PAM type: YTN; PAM sequence: CTG
gtctatgtgcctatttttat

SEQ ID NO: 413489 - DNA, 20 bp, Artificial Sequence
  Description of Artificial Sequence: Synthetic oligonucleotide
  Target: LAMA2; (+) strand; PAM type: YTN; PAM sequence: CTA
tgtgcctatttttatgccag

SEQ ID NO: 413490 - DNA, 20 bp, Artificial Sequence
  Description of Artificial Sequence: Synthetic oligonucleotide
  Target: LAMA2; (+) strand; PAM type: YTN; PAM sequence: CTA
tttttatgccagtactatgc

SEQ ID NO: 413491 - DNA, 20 bp, Artificial Sequence
  Description of Artificial Sequence: Synthetic oligonucleotide
  Target: LAMA2; (+) strand; PAM type: YTN; PAM sequence: TTT
ttatgccagtactatgccgt

SEQ ID NO: 413492 - DNA, 20 bp, Artificial Sequence
  Description of Artificial Sequence: Synthetic oligonucleotide
  Target: LAMA2; (+) strand; PAM type: YTN; PAM sequence: TTT
tatgccagtactatgccgtt

SEQ ID NO: 413493 - DNA, 20 bp, Artificial Sequence
  Description of Artificial Sequence: Synthetic oligonucleotide
  Target: LAMA2; (+) strand; PAM type: YTN; PAM sequence: TTT
atgccagtactatgccgttt

SEQ ID NO: 413494 - DNA, 20 bp, Artificial Sequence
  Description of Artificial Sequence: Synthetic oligonucleotide
  Target: LAMA2; (+) strand; PAM type: YTN; PAM sequence: TTA
tgccagtactatgccgtttg

SEQ ID NO: 413495 - DNA, 20 bp, Artificial Sequence
  Description of Artificial Sequence: Synthetic oligonucleotide
  Target: LAMA2; (+) strand; PAM type: YTN; PAM sequence: CTA
tgccgtttggcttactatag

SEQ ID NO: 413496 - DNA, 20 bp, Artificial Sequence
  Description of Artificial Sequence: Synthetic oligonucleotide
  Target: LAMA2; (+) strand; PAM type: YTN; PAM sequence: TTT
ggcttactatagttctgtgg

SEQ ID NO: 413497 - DNA, 20 bp, Artificial Sequence
  Description of Artificial Sequence: Synthetic oligonucleotide
  Target: LAMA2; (+) strand; PAM type: YTN; PAM sequence: TTG
gcttactatagttctgtggt

SEQ ID NO: 413498 - DNA, 20 bp, Artificial Sequence
  Description of Artificial Sequence: Synthetic oligonucleotide
  Target: LAMA2; (+) strand; PAM type: YTN; PAM sequence: CTT
actatagttctgtggtataa

SEQ ID NO: 413499 - DNA, 20 bp, Artificial Sequence
  Description of Artificial Sequence: Synthetic oligonucleotide
  Target: LAMA2; (+) strand; PAM type: YTN; PAM sequence: TTA
ctatagttctgtggtataat

SEQ ID NO: 413500 - DNA, 20 bp, Artificial Sequence
  Description of Artificial Sequence: Synthetic oligonucleotide
  Target: LAMA2; (+) strand; PAM type: YTN; PAM sequence: CTA
tagttctgtggtataatttg

SEQ ID NO: 413501 - DNA, 20 bp, Artificial Sequence
  Description of Artificial Sequence: Synthetic oligonucleotide
  Target: LAMA2; (+) strand; PAM type: YTN; PAM sequence: TTC
tgtggtataatttgaagtcc

SEQ ID NO: 413502 - DNA, 20 bp, Artificial Sequence
  Description of Artificial Sequence: Synthetic oligonucleotide
  Target: LAMA2; (+) strand; PAM type: YTN; PAM sequence: CTG
tggtataatttgaagtccgg

SEQ ID NO: 413503 - DNA, 20 bp, Artificial Sequence
  Description of Artificial Sequence: Synthetic oligonucleotide
  Target: LAMA2; (+) strand; PAM type: YTN; PAM sequence: TTT
gaagtccggtaatgtaattc

SEQ ID NO: 413504 - DNA, 20 bp, Artificial Sequence
  Description of Artificial Sequence: Synthetic oligonucleotide
  Target: LAMA2; (+) strand; PAM type: YTN; PAM sequence: TTG
aagtccggtaatgtaattct

SEQ ID NO: 413505 - DNA, 20 bp, Artificial Sequence
  Description of Artificial Sequence: Synthetic oligonucleotide
  Target: LAMA2; (+) strand; PAM type: YTN; PAM sequence: TTC
ttccaattttgttccttttg

SEQ ID NO: 413506 - DNA, 20 bp, Artificial Sequence
  Description of Artificial Sequence: Synthetic oligonucleotide
  Target: LAMA2; (+) strand; PAM type: YTN; PAM sequence: CTT
ccaattttgttccttttgca

SEQ ID NO: 413507 - DNA, 20 bp, Artificial Sequence
  Description of Artificial Sequence: Synthetic oligonucleotide
  Target: LAMA2; (+) strand; PAM type: YTN; PAM sequence: TTC
caattttgttccttttgcat

SEQ ID NO: 413508 - DNA, 20 bp, Artificial Sequence
  Description of Artificial Sequence: Synthetic oligonucleotide
  Target: LAMA2; (+) strand; PAM type: YTN; PAM sequence: TTT
tgttccttttgcataggata

SEQ ID NO: 413509 - DNA, 20 bp, Artificial Sequence
  Description of Artificial Sequence: Synthetic oligonucleotide
  Target: LAMA2; (+) strand; PAM type: YTN; PAM sequence: TTT
gttccttttgcataggatag

SEQ ID NO: 413510 - DNA, 20 bp, Artificial Sequence
  Description of Artificial Sequence: Synthetic oligonucleotide
  Target: LAMA2; (+) strand; PAM type: YTN; PAM sequence: TTG
ttccttttgcataggatagc

SEQ ID NO: 413511 - DNA, 20 bp, Artificial Sequence
  Description of Artificial Sequence: Synthetic oligonucleotide
  Target: LAMA2; (+) strand; PAM type: YTN; PAM sequence: TTC
cttttgcataggatagctgt

SEQ ID NO: 413512 - DNA, 20 bp, Artificial Sequence
  Description of Artificial Sequence: Synthetic oligonucleotide
  Target: LAMA2; (+) strand; PAM type: YTN; PAM sequence: CTT
ttgcataggatagctgtggc

SEQ ID NO: 413513 - DNA, 20 bp, Artificial Sequence
  Description of Artificial Sequence: Synthetic oligonucleotide
  Target: LAMA2; (+) strand; PAM type: YTN; PAM sequence: TTT
tgcataggatagctgtggct

SEQ ID NO: 413514 - DNA, 20 bp, Artificial Sequence
  Description of Artificial Sequence: Synthetic oligonucleotide
  Target: LAMA2; (+) strand; PAM type: YTN; PAM sequence: TTT
gcataggatagctgtggcta

SEQ ID NO: 413515 - DNA, 20 bp, Artificial Sequence
  Description of Artificial Sequence: Synthetic oligonucleotide
  Target: LAMA2; (+) strand; PAM type: YTN; PAM sequence: TTG
cataggatagctgtggctat

SEQ ID NO: 413516 - DNA, 20 bp, Artificial Sequence
  Description of Artificial Sequence: Synthetic oligonucleotide
  Target: LAMA2; (+) strand; PAM type: YTN; PAM sequence: CTG
tggctattctgggtttcata

SEQ ID NO: 413517 - DNA, 20 bp, Artificial Sequence
  Description of Artificial Sequence: Synthetic oligonucleotide
  Target: LAMA2; (+) strand; PAM type: YTN; PAM sequence: CTA
ttctgggtttcatatgaatt

SEQ ID NO: 413518 - DNA, 20 bp, Artificial Sequence
  Description of Artificial Sequence: Synthetic oligonucleotide
  Target: LAMA2; (+) strand; PAM type: YTN; PAM sequence: TTC
tgggtttcatatgaatttta

SEQ ID NO: 413519 - DNA, 20 bp, Artificial Sequence
  Description of Artificial Sequence: Synthetic oligonucleotide
  Target: LAMA2; (+) strand; PAM type: YTN; PAM sequence: CTG
ggtttcatatgaattttagg

SEQ ID NO: 413520 - DNA, 20 bp, Artificial Sequence
  Description of Artificial Sequence: Synthetic oligonucleotide
  Target: LAMA2; (+) strand; PAM type: YTN; PAM sequence: TTT
catatgaattttaggaattt

SEQ ID NO: 413521 - DNA, 20 bp, Artificial Sequence
  Description of Artificial Sequence: Synthetic oligonucleotide
  Target: LAMA2; (+) strand; PAM type: YTN; PAM sequence: TTC
atatgaattttaggaatttt

SEQ ID NO: 413522 - DNA, 20 bp, Artificial Sequence
  Description of Artificial Sequence: Synthetic oligonucleotide
  Target: LAMA2; (+) strand; PAM type: YTN; PAM sequence: TTT
taggaattttttctatttct

SEQ ID NO: 413523 - DNA, 20 bp, Artificial Sequence
  Description of Artificial Sequence: Synthetic oligonucleotide
  Target: LAMA2; (+) strand; PAM type: YTN; PAM sequence: TTT
aggaattttttctatttctg

SEQ ID NO: 413524 - DNA, 20 bp, Artificial Sequence
  Description of Artificial Sequence: Synthetic oligonucleotide
  Target: LAMA2; (+) strand; PAM type: YTN; PAM sequence: TTA
ggaattttttctatttctgt

SEQ ID NO: 413525 - DNA, 20 bp, Artificial Sequence
  Description of Artificial Sequence: Synthetic oligonucleotide
  Target: LAMA2; (+) strand; PAM type: YTN; PAM sequence: TTT
tttctatttctgtgaagaat

SEQ ID NO: 413526 - DNA, 20 bp, Artificial Sequence
  Description of Artificial Sequence: Synthetic oligonucleotide
  Target: LAMA2; (+) strand; PAM type: YTN; PAM sequence: TTT
ttctatttctgtgaagaatc

SEQ ID NO: 413527 - DNA, 20 bp, Artificial Sequence
  Description of Artificial Sequence: Synthetic oligonucleotide
  Target: LAMA2; (+) strand; PAM type: YTN; PAM sequence: TTT
tctatttctgtgaagaatct

SEQ ID NO: 413528 - DNA, 20 bp, Artificial Sequence
  Description of Artificial Sequence: Synthetic oligonucleotide
  Target: LAMA2; (+) strand; PAM type: YTN; PAM sequence: TTT
ctatttctgtgaagaatctc

SEQ ID NO: 413529 - DNA, 20 bp, Artificial Sequence
  Description of Artificial Sequence: Synthetic oligonucleotide
  Target: LAMA2; (+) strand; PAM type: YTN; PAM sequence: TTC
tatttctgtgaagaatctca

SEQ ID NO: 413530 - DNA, 20 bp, Artificial Sequence
  Description of Artificial Sequence: Synthetic oligonucleotide
  Target: LAMA2; (+) strand; PAM type: YTN; PAM sequence: CTA
tttctgtgaagaatctcatt

SEQ ID NO: 413531 - DNA, 20 bp, Artificial Sequence
  Description of Artificial Sequence: Synthetic oligonucleotide
  Target: LAMA2; (+) strand; PAM type: YTN; PAM sequence: TTT
ctgtgaagaatctcattggt

SEQ ID NO: 413532 - DNA, 20 bp, Artificial Sequence
  Description of Artificial Sequence: Synthetic oligonucleotide
  Target: LAMA2; (+) strand; PAM type: YTN; PAM sequence: TTC
tgtgaagaatctcattggta

SEQ ID NO: 413533 - DNA, 20 bp, Artificial Sequence
  Description of Artificial Sequence: Synthetic oligonucleotide
  Target: LAMA2; (+) strand; PAM type: YTN; PAM sequence: CTG
tgaagaatctcattggtatt

SEQ ID NO: 413534 - DNA, 20 bp, Artificial Sequence
  Description of Artificial Sequence: Synthetic oligonucleotide
  Target: LAMA2; (+) strand; PAM type: YTN; PAM sequence: CTC
attggtattttaatagggat

SEQ ID NO: 413535 - DNA, 20 bp, Artificial Sequence
  Description of Artificial Sequence: Synthetic oligonucleotide
  Target: LAMA2; (+) strand; PAM type: YTN; PAM sequence: TTG
gtattttaatagggattata

SEQ ID NO: 413536 - DNA, 20 bp, Artificial Sequence
  Description of Artificial Sequence: Synthetic oligonucleotide
  Target: LAMA2; (+) strand; PAM type: YTN; PAM sequence: TTT
taatagggattatattaaat

SEQ ID NO: 413537 - DNA, 20 bp, Artificial Sequence
  Description of Artificial Sequence: Synthetic oligonucleotide
  Target: LAMA2; (+) strand; PAM type: YTN; PAM sequence: TTT
aatagggattatattaaatc

SEQ ID NO: 413538 - DNA, 20 bp, Artificial Sequence
  Description of Artificial Sequence: Synthetic oligonucleotide
  Target: LAMA2; (+) strand; PAM type: YTN; PAM sequence: TTA
atagggattatattaaatct

SEQ ID NO: 413539 - DNA, 20 bp, Artificial Sequence
  Description of Artificial Sequence: Synthetic oligonucleotide
  Target: LAMA2; (+) strand; PAM type: YTN; PAM sequence: TTA
tattaaatctgcagattgct

SEQ ID NO: 413540 - DNA, 20 bp, Artificial Sequence
  Description of Artificial Sequence: Synthetic oligonucleotide
  Target: LAMA2; (+) strand; PAM type: YTN; PAM sequence: TTA
aatctgcagattgctctggg

SEQ ID NO: 413541 - DNA, 20 bp, Artificial Sequence
  Description of Artificial Sequence: Synthetic oligonucleotide
  Target: LAMA2; (+) strand; PAM type: YTN; PAM sequence: CTG
cagattgctctgggtagtat

SEQ ID NO: 413542 - DNA, 20 bp, Artificial Sequence
  Description of Artificial Sequence: Synthetic oligonucleotide
  Target: LAMA2; (+) strand; PAM type: YTN; PAM sequence: TTG
ctctgggtagtatggacatt

SEQ ID NO: 413543 - DNA, 20 bp, Artificial Sequence
  Description of Artificial Sequence: Synthetic oligonucleotide
  Target: LAMA2; (+) strand; PAM type: YTN; PAM sequence: CTC
tgggtagtatggacatttta

SEQ ID NO: 413544 - DNA, 20 bp, Artificial Sequence
  Description of Artificial Sequence: Synthetic oligonucleotide
  Target: LAMA2; (+) strand; PAM type: YTN; PAM sequence: CTG
ggtagtatggacattttaac

SEQ ID NO: 413545 - DNA, 20 bp, Artificial Sequence
  Description of Artificial Sequence: Synthetic oligonucleotide
  Target: LAMA2; (+) strand; PAM type: YTN; PAM sequence: TTT
taacaatattgattcttcca

SEQ ID NO: 413546 - DNA, 20 bp, Artificial Sequence
  Description of Artificial Sequence: Synthetic oligonucleotide
  Target: LAMA2; (+) strand; PAM type: YTN; PAM sequence: TTT
aacaatattgattcttccaa

SEQ ID NO: 413547 - DNA, 20 bp, Artificial Sequence
  Description of Artificial Sequence: Synthetic oligonucleotide
  Target: LAMA2; (+) strand; PAM type: YTN; PAM sequence: TTA
acaatattgattcttccaat

SEQ ID NO: 413548 - DNA, 20 bp, Artificial Sequence
  Description of Artificial Sequence: Synthetic oligonucleotide
  Target: LAMA2; (+) strand; PAM type: YTN; PAM sequence: TTG
attcttccaatccattaaca

SEQ ID NO: 413549 - DNA, 20 bp, Artificial Sequence
  Description of Artificial Sequence: Synthetic oligonucleotide
  Target: LAMA2; (+) strand; PAM type: YTN; PAM sequence: TTC
ttccaatccattaacatgga

SEQ ID NO: 413550 - DNA, 20 bp, Artificial Sequence
  Description of Artificial Sequence: Synthetic oligonucleotide
  Target: LAMA2; (+) strand; PAM type: YTN; PAM sequence: CTT
ccaatccattaacatggaat

SEQ ID NO: 413551 - DNA, 20 bp, Artificial Sequence
  Description of Artificial Sequence: Synthetic oligonucleotide
  Target: LAMA2; (+) strand; PAM type: YTN; PAM sequence: TTC
caatccattaacatggaata

SEQ ID NO: 413552 - DNA, 20 bp, Artificial Sequence
  Description of Artificial Sequence: Synthetic oligonucleotide
  Target: LAMA2; (+) strand; PAM type: YTN; PAM sequence: TTA
acatggaatatcttattttt

SEQ ID NO: 413553 - DNA, 20 bp, Artificial Sequence
  Description of Artificial Sequence: Synthetic oligonucleotide
  Target: LAMA2; (+) strand; PAM type: YTN; PAM sequence: CTT
atttttgtgccctcttgaat

SEQ ID NO: 413554 - DNA, 20 bp, Artificial Sequence
  Description of Artificial Sequence: Synthetic oligonucleotide
  Target: LAMA2; (+) strand; PAM type: YTN; PAM sequence: TTA
tttttgtgccctcttgaatt

SEQ ID NO: 413555 - DNA, 20 bp, Artificial Sequence
  Description of Artificial Sequence: Synthetic oligonucleotide
  Target: LAMA2; (+) strand; PAM type: YTN; PAM sequence: TTT
ttgtgccctcttgaatttct

SEQ ID NO: 413556 - DNA, 20 bp, Artificial Sequence
  Description of Artificial Sequence: Synthetic oligonucleotide
  Target: LAMA2; (+) strand; PAM type: YTN; PAM sequence: TTT
tgtgccctcttgaatttctt

SEQ ID NO: 413557 - DNA, 20 bp, Artificial Sequence
  Description of Artificial Sequence: Synthetic oligonucleotide
  Target: LAMA2; (+) strand; PAM type: YTN; PAM sequence: TTT
gtgccctcttgaatttcttg

SEQ ID NO: 413558 - DNA, 20 bp, Artificial Sequence
  Description of Artificial Sequence: Synthetic oligonucleotide
  Target: LAMA2; (+) strand; PAM type: YTN; PAM sequence: TTG
tgccctcttgaatttcttgc

SEQ ID NO: 413559 - DNA, 20 bp, Artificial Sequence
  Description of Artificial Sequence: Synthetic oligonucleotide
  Target: LAMA2; (+) strand; PAM type: YTN; PAM sequence: CTC
ttgaatttcttgcatcattg

SEQ ID NO: 413560 - DNA, 20 bp, Artificial Sequence
  Description of Artificial Sequence: Synthetic oligonucleotide
  Target: LAMA2; (+) strand; PAM type: YTN; PAM sequence: CTT
gaatttcttgcatcattgtt

SEQ ID NO: 413561 - DNA, 20 bp, Artificial Sequence
  Description of Artificial Sequence: Synthetic oligonucleotide
  Target: LAMA2; (+) strand; PAM type: YTN; PAM sequence: TTG
aatttcttgcatcattgttt

SEQ ID NO: 413562 - DNA, 20 bp, Artificial Sequence
  Description of Artificial Sequence: Synthetic oligonucleotide
  Target: LAMA2; (+) strand; PAM type: YTN; PAM sequence: TTT
cttgcatcattgttttatag

SEQ ID NO: 413563 - DNA, 20 bp, Artificial Sequence
  Description of Artificial Sequence: Synthetic oligonucleotide
  Target: LAMA2; (+) strand; PAM type: YTN; PAM sequence: TTC
ttgcatcattgttttatagt

SEQ ID NO: 413564 - DNA, 20 bp, Artificial Sequence
  Description of Artificial Sequence: Synthetic oligonucleotide
  Target: LAMA2; (+) strand; PAM type: YTN; PAM sequence: CTT
gcatcattgttttatagttt

SEQ ID NO: 413565 - DNA, 20 bp, Artificial Sequence
  Description of Artificial Sequence: Synthetic oligonucleotide
  Target: LAMA2; (+) strand; PAM type: YTN; PAM sequence: TTG
catcattgttttatagtttt

SEQ ID NO: 413566 - DNA, 20 bp, Artificial Sequence
  Description of Artificial Sequence: Synthetic oligonucleotide
  Target: LAMA2; (+) strand; PAM type: YTN; PAM sequence: TTG
ttttatagtttttattgtac

SEQ ID NO: 413567 - DNA, 20 bp, Artificial Sequence
  Description of Artificial Sequence: Synthetic oligonucleotide
  Target: LAMA2; (+) strand; PAM type: YTN; PAM sequence: TTT
tatagtttttattgtacttt

SEQ ID NO: 413568 - DNA, 20 bp, Artificial Sequence
  Description of Artificial Sequence: Synthetic oligonucleotide
  Target: LAMA2; (+) strand; PAM type: YTN; PAM sequence: TTT
atagtttttattgtactttc

SEQ ID NO: 413569 - DNA, 20 bp, Artificial Sequence
  Description of Artificial Sequence: Synthetic oligonucleotide
  Target: LAMA2; (+) strand; PAM type: YTN; PAM sequence: TTA
tagtttttattgtactttcc

SEQ ID NO: 413570 - DNA, 20 bp, Artificial Sequence
  Description of Artificial Sequence: Synthetic oligonucleotide
  Target: LAMA2; (+) strand; PAM type: YTN; PAM sequence: TTT
ttattgtactttcctctaag

SEQ ID NO: 413571 - DNA, 20 bp, Artificial Sequence
  Description of Artificial Sequence: Synthetic oligonucleotide
  Target: LAMA2; (+) strand; PAM type: YTN; PAM sequence: TTT
tattgtactttcctctaaga

SEQ ID NO: 413572 - DNA, 20 bp, Artificial Sequence
  Description of Artificial Sequence: Synthetic oligonucleotide
  Target: LAMA2; (+) strand; PAM type: YTN; PAM sequence: TTT
attgtactttcctctaagat

SEQ ID NO: 413573 - DNA, 20 bp, Artificial Sequence
  Description of Artificial Sequence: Synthetic oligonucleotide
  Target: LAMA2; (+) strand; PAM type: YTN; PAM sequence: TTA
ttgtactttcctctaagatc

SEQ ID NO: 413574 - DNA, 20 bp, Artificial Sequence
  Description of Artificial Sequence: Synthetic oligonucleotide
  Target: LAMA2; (+) strand; PAM type: YTN; PAM sequence: TTG
tactttcctctaagatctgg

SEQ ID NO: 413575 - DNA, 20 bp, Artificial Sequence
  Description of Artificial Sequence: Synthetic oligonucleotide
  Target: LAMA2; (+) strand; PAM type: YTN; PAM sequence: CTT
tcctctaagatctggaacac

SEQ ID NO: 413576 - DNA, 20 bp, Artificial Sequence
  Description of Artificial Sequence: Synthetic oligonucleotide
  Target: LAMA2; (+) strand; PAM type: YTN; PAM sequence: TTT
cctctaagatctggaacacg

SEQ ID NO: 413577 - DNA, 20 bp, Artificial Sequence
  Description of Artificial Sequence: Synthetic oligonucleotide
  Target: LAMA2; (+) strand; PAM type: YTN; PAM sequence: TTC
ctctaagatctggaacacga

SEQ ID NO: 413578 - DNA, 20 bp, Artificial Sequence
  Description of Artificial Sequence: Synthetic oligonucleotide
  Target: LAMA2; (+) strand; PAM type: YTN; PAM sequence: CTC
taagatctggaacacgacaa

SEQ ID NO: 413579 - DNA, 20 bp, Artificial Sequence
  Description of Artificial Sequence: Synthetic oligonucleotide
  Target: LAMA2; (+) strand; PAM type: YTN; PAM sequence: CTA
agatctggaacacgacaagg

SEQ ID NO: 413580 - DNA, 20 bp, Artificial Sequence
  Description of Artificial Sequence: Synthetic oligonucleotide
  Target: LAMA2; (+) strand; PAM type: YTN; PAM sequence: CTG
gaacacgacaaggatgccca

SEQ ID NO: 413581 - DNA, 20 bp, Artificial Sequence
  Description of Artificial Sequence: Synthetic oligonucleotide
  Target: LAMA2; (+) strand; PAM type: YTN; PAM sequence: CTC
tcaccactgttattcaacat

SEQ ID NO: 413582 - DNA, 20 bp, Artificial Sequence
  Description of Artificial Sequence: Synthetic oligonucleotide
  Target: LAMA2; (+) strand; PAM type: YTN; PAM sequence: CTC
accactgttattcaacatag

SEQ ID NO: 413583 - DNA, 20 bp, Artificial Sequence
  Description of Artificial Sequence: Synthetic oligonucleotide
  Target: LAMA2; (+) strand; PAM type: YTN; PAM sequence: CTG
ttattcaacatagtattgga

SEQ ID NO: 413584 - DNA, 20 bp, Artificial Sequence
  Description of Artificial Sequence: Synthetic oligonucleotide
  Target: LAMA2; (+) strand; PAM type: YTN; PAM sequence: TTA
ttcaacatagtattggaagt

SEQ ID NO: 413585 - DNA, 20 bp, Artificial Sequence
  Description of Artificial Sequence: Synthetic oligonucleotide
  Target: LAMA2; (+) strand; PAM type: YTN; PAM sequence: TTC
aacatagtattggaagtcct

SEQ ID NO: 413586 - DNA, 20 bp, Artificial Sequence
  Description of Artificial Sequence: Synthetic oligonucleotide
  Target: LAMA2; (+) strand; PAM type: YTN; PAM sequence: TTG
gaagtcctagctagagcagt

SEQ ID NO: 413587 - DNA, 20 bp, Artificial Sequence
  Description of Artificial Sequence: Synthetic oligonucleotide
  Target: LAMA2; (+) strand; PAM type: YTN; PAM sequence: CTA
gctagagcagtcagacaaga

SEQ ID NO: 413588 - DNA, 20 bp, Artificial Sequence
  Description of Artificial Sequence: Synthetic oligonucleotide
  Target: LAMA2; (+) strand; PAM type: YTN; PAM sequence: CTA
gagcagtcagacaagagaaa

SEQ ID NO: 413589 - DNA, 20 bp, Artificial Sequence
  Description of Artificial Sequence: Synthetic oligonucleotide
  Target: LAMA2; (+) strand; PAM type: YTN; PAM sequence: TTA
tccttgtttgcaaatgatat

SEQ ID NO: 413590 - DNA, 20 bp, Artificial Sequence
  Description of Artificial Sequence: Synthetic oligonucleotide
  Target: LAMA2; (+) strand; PAM type: YTN; PAM sequence: CTT
gtttgcaaatgatatgattt

SEQ ID NO: 413591 - DNA, 20 bp, Artificial Sequence
  Description of Artificial Sequence: Synthetic oligonucleotide
  Target: LAMA2; (+) strand; PAM type: YTN; PAM sequence: TTG
tttgcaaatgatatgatttt

SEQ ID NO: 413592 - DNA, 20 bp, Artificial Sequence
  Description of Artificial Sequence: Synthetic oligonucleotide
  Target: LAMA2; (+) strand; PAM type: YTN; PAM sequence: TTT
gcaaatgatatgattttgta

SEQ ID NO: 413593 - DNA, 20 bp, Artificial Sequence
  Description of Artificial Sequence: Synthetic oligonucleotide
  Target: LAMA2; (+) strand; PAM type: YTN; PAM sequence: TTG
caaatgatatgattttgtat

SEQ ID NO: 413594 - DNA, 20 bp, Artificial Sequence
  Description of Artificial Sequence: Synthetic oligonucleotide
  Target: LAMA2; (+) strand; PAM type: YTN; PAM sequence: TTT
tgtatttggaaaagcctaaa

SEQ ID NO: 413595 - DNA, 20 bp, Artificial Sequence
  Description of Artificial Sequence: Synthetic oligonucleotide
  Target: LAMA2; (+) strand; PAM type: YTN; PAM sequence: TTT
gtatttggaaaagcctaaag

SEQ ID NO: 413596 - DNA, 20 bp, Artificial Sequence
  Description of Artificial Sequence: Synthetic oligonucleotide
  Target: LAMA2; (+) strand; PAM type: YTN; PAM sequence: TTG
tatttggaaaagcctaaaga

SEQ ID NO: 413597 - DNA, 20 bp, Artificial Sequence
  Description of Artificial Sequence: Synthetic oligonucleotide
  Target: LAMA2; (+) strand; PAM type: YTN; PAM sequence: TTT
ggaaaagcctaaagacccca

SEQ ID NO: 413598 - DNA, 20 bp, Artificial Sequence
  Description of Artificial Sequence: Synthetic oligonucleotide
  Target: LAMA2; (+) strand; PAM type: YTN; PAM sequence: TTG
gaaaagcctaaagaccccac

SEQ ID NO: 413599 - DNA, 20 bp, Artificial Sequence
  Description of Artificial Sequence: Synthetic oligonucleotide
  Target: LAMA2; (+) strand; PAM type: YTN; PAM sequence: CTA
aagaccccaccaaaaaacca

SEQ ID NO: 413600 - DNA, 20 bp, Artificial Sequence
  Description of Artificial Sequence: Synthetic oligonucleotide
  Target: LAMA2; (+) strand; PAM type: YTN; PAM sequence: TTA
gaactgataaattcagtaaa

SEQ ID NO: 413601 - DNA, 20 bp, Artificial Sequence
  Description of Artificial Sequence: Synthetic oligonucleotide
  Target: LAMA2; (+) strand; PAM type: YTN; PAM sequence: CTG
ataaattcagtaaagctgca

SEQ ID NO: 413602 - DNA, 20 bp, Artificial Sequence
  Description of Artificial Sequence: Synthetic oligonucleotide
  Target: LAMA2; (+) strand; PAM type: YTN; PAM sequence: TTC
agtaaagctgcaggatacaa

SEQ ID NO: 413603 - DNA, 20 bp, Artificial Sequence
  Description of Artificial Sequence: Synthetic oligonucleotide
  Target: LAMA2; (+) strand; PAM type: YTN; PAM sequence: CTG
caggatacaaagtcaacata

SEQ ID NO: 413604 - DNA, 20 bp, Artificial Sequence
  Description of Artificial Sequence: Synthetic oligonucleotide
  Target: LAMA2; (+) strand; PAM type: YTN; PAM sequence: TTT
ctatatgccaacagcaaaca

SEQ ID NO: 413605 - DNA, 20 bp, Artificial Sequence
  Description of Artificial Sequence: Synthetic oligonucleotide
  Target: LAMA2; (+) strand; PAM type: YTN; PAM sequence: TTC
tatatgccaacagcaaacaa

SEQ ID NO: 413606 - DNA, 20 bp, Artificial Sequence
  Description of Artificial Sequence: Synthetic oligonucleotide
  Target: LAMA2; (+) strand; PAM type: YTN; PAM sequence: CTA
tatgccaacagcaaacaatc

SEQ ID NO: 413607 - DNA, 20 bp, Artificial Sequence
  Description of Artificial Sequence: Synthetic oligonucleotide
  Target: LAMA2; (+) strand; PAM type: YTN; PAM sequence: TTC
catttacagtagctacaaat

SEQ ID NO: 413608 - DNA, 20 bp, Artificial Sequence
  Description of Artificial Sequence: Synthetic oligonucleotide
  Target: LAMA2; (+) strand; PAM type: YTN; PAM sequence: TTT
acagtagctacaaataaaat

SEQ ID NO: 413609 - DNA, 20 bp, Artificial Sequence
  Description of Artificial Sequence: Synthetic oligonucleotide
  Target: LAMA2; (+) strand; PAM type: YTN; PAM sequence: TTA
cagtagctacaaataaaata

SEQ ID NO: 413610 - DNA, 20 bp, Artificial Sequence
  Description of Artificial Sequence: Synthetic oligonucleotide
  Target: LAMA2; (+) strand; PAM type: YTN; PAM sequence: CTA
caaataaaataaaatactaa

SEQ ID NO: 413611 - DNA, 20 bp, Artificial Sequence
  Description of Artificial Sequence: Synthetic oligonucleotide
  Target: LAMA2; (+) strand; PAM type: YTN; PAM sequence: CTA
aggaattaaccaaataagtg

SEQ ID NO: 413612 - DNA, 20 bp, Artificial Sequence
  Description of Artificial Sequence: Synthetic oligonucleotide
  Target: LAMA2; (+) strand; PAM type: YTN; PAM sequence: TTA
accaaataagtgaaaggtct

SEQ ID NO: 413613 - DNA, 20 bp, Artificial Sequence
  Description of Artificial Sequence: Synthetic oligonucleotide
  Target: LAMA2; (+) strand; PAM type: YTN; PAM sequence: CTC
tacaatgaaaactgcataat

SEQ ID NO: 413614 - DNA, 20 bp, Artificial Sequence
  Description of Artificial Sequence: Synthetic oligonucleotide
  Target: LAMA2; (+) strand; PAM type: YTN; PAM sequence: CTA
caatgaaaactgcataataa

SEQ ID NO: 413615 - DNA, 20 bp, Artificial Sequence
  Description of Artificial Sequence: Synthetic oligonucleotide
  Target: LAMA2; (+) strand; PAM type: YTN; PAM sequence: CTG
cataataatttttaaaatct

SEQ ID NO: 413616 - DNA, 20 bp, Artificial Sequence
  Description of Artificial Sequence: Synthetic oligonucleotide
  Target: LAMA2; (+) strand; PAM type: YTN; PAM sequence: TTT
ttaaaatctgcaattaatgt

SEQ ID NO: 413617 - DNA, 20 bp, Artificial Sequence
  Description of Artificial Sequence: Synthetic oligonucleotide
  Target: LAMA2; (+) strand; PAM type: YTN; PAM sequence: TTT
taaaatctgcaattaatgta

SEQ ID NO: 413618 - DNA, 20 bp, Artificial Sequence
  Description of Artificial Sequence: Synthetic oligonucleotide
  Target: LAMA2; (+) strand; PAM type: YTN; PAM sequence: TTT
aaaatctgcaattaatgtac

SEQ ID NO: 413619 - DNA, 20 bp, Artificial Sequence
  Description of Artificial Sequence: Synthetic oligonucleotide
  Target: LAMA2; (+) strand; PAM type: YTN; PAM sequence: TTA
aaatctgcaattaatgtact

SEQ ID NO: 413620 - DNA, 20 bp, Artificial Sequence
  Description of Artificial Sequence: Synthetic oligonucleotide
  Target: LAMA2; (+) strand; PAM type: YTN; PAM sequence: CTG
caattaatgtactttaagat

SEQ ID NO: 413621 - DNA, 20 bp, Artificial Sequence
  Description of Artificial Sequence: Synthetic oligonucleotide
  Target: LAMA2; (+) strand; PAM type: YTN; PAM sequence: TTA
atgtactttaagatagaata

SEQ ID NO: 413622 - DNA, 20 bp, Artificial Sequence
  Description of Artificial Sequence: Synthetic oligonucleotide
  Target: LAMA2; (+) strand; PAM type: YTN; PAM sequence: CTT
taagatagaatattcagtcc

SEQ ID NO: 413623 - DNA, 20 bp, Artificial Sequence
  Description of Artificial Sequence: Synthetic oligonucleotide
  Target: LAMA2; (+) strand; PAM type: YTN; PAM sequence: TTT
aagatagaatattcagtccc

SEQ ID NO: 413624 - DNA, 20 bp, Artificial Sequence
  Description of Artificial Sequence: Synthetic oligonucleotide
  Target: LAMA2; (+) strand; PAM type: YTN; PAM sequence: TTA
agatagaatattcagtcccg

SEQ ID NO: 413625 - DNA, 20 bp, Artificial Sequence
  Description of Artificial Sequence: Synthetic oligonucleotide
  Target: LAMA2; (+) strand; PAM type: YTN; PAM sequence: TTC
agtcccgtggtatcatagaa

SEQ ID NO: 413626 - DNA, 20 bp, Artificial Sequence
  Description of Artificial Sequence: Synthetic oligonucleotide
  Target: LAMA2; (+) strand; PAM type: YTN; PAM sequence: TTC
attagaaataaactaataag

SEQ ID NO: 413627 - DNA, 20 bp, Artificial Sequence
  Description of Artificial Sequence: Synthetic oligonucleotide
  Target: LAMA2; (+) strand; PAM type: YTN; PAM sequence: TTA
gaaataaactaataagcaca

SEQ ID NO: 413628 - DNA, 20 bp, Artificial Sequence
  Description of Artificial Sequence: Synthetic oligonucleotide
  Target: LAMA2; (+) strand; PAM type: YTN; PAM sequence: CTA
ataagcacataatatgtgga

SEQ ID NO: 413629 - DNA, 20 bp, Artificial Sequence
  Description of Artificial Sequence: Synthetic oligonucleotide
  Target: LAMA2; (+) strand; PAM type: YTN; PAM sequence: TTA
tgatgggaaacagaaataag

SEQ ID NO: 413630 - DNA, 20 bp, Artificial Sequence
  Description of Artificial Sequence: Synthetic oligonucleotide
  Target: LAMA2; (+) strand; PAM type: YTN; PAM sequence: TTC
tttctatcaagaatatatta

SEQ ID NO: 413631 - DNA, 20 bp, Artificial Sequence
  Description of Artificial Sequence: Synthetic oligonucleotide
  Target: LAMA2; (+) strand; PAM type: YTN; PAM sequence: CTT
tctatcaagaatatattatc

SEQ ID NO: 413632 - DNA, 20 bp, Artificial Sequence
  Description of Artificial Sequence: Synthetic oligonucleotide
  Target: LAMA2; (+) strand; PAM type: YTN; PAM sequence: TTT
ctatcaagaatatattatca

SEQ ID NO: 413633 - DNA, 20 bp, Artificial Sequence
  Description of Artificial Sequence: Synthetic oligonucleotide
  Target: LAMA2; (+) strand; PAM type: YTN; PAM sequence: TTC
tatcaagaatatattatcaa

SEQ ID NO: 413634 - DNA, 20 bp, Artificial Sequence
  Description of Artificial Sequence: Synthetic oligonucleotide
  Target: LAMA2; (+) strand; PAM type: YTN; PAM sequence: CTA
tcaagaatatattatcaact

SEQ ID NO: 413635 - DNA, 20 bp, Artificial Sequence
  Description of Artificial Sequence: Synthetic oligonucleotide
  Target: LAMA2; (+) strand; PAM type: YTN; PAM sequence: TTA
tcaactggtaagaaattgaa

SEQ ID NO: 413636 - DNA, 20 bp, Artificial Sequence
  Description of Artificial Sequence: Synthetic oligonucleotide
  Target: LAMA2; (+) strand; PAM type: YTN; PAM sequence: CTG
gtaagaaattgaaagaaggc

SEQ ID NO: 413637 - DNA, 20 bp, Artificial Sequence
  Description of Artificial Sequence: Synthetic oligonucleotide
  Target: LAMA2; (+) strand; PAM type: YTN; PAM sequence: TTG
aaagaaggcaagtaaaaatg

SEQ ID NO: 413638 - DNA, 20 bp, Artificial Sequence
  Description of Artificial Sequence: Synthetic oligonucleotide
  Target: LAMA2; (+) strand; PAM type: YTN; PAM sequence: TTA
aagacaaaaaaagcacagtt

SEQ ID NO: 413639 - DNA, 20 bp, Artificial Sequence
  Description of Artificial Sequence: Synthetic oligonucleotide
  Target: LAMA2; (+) strand; PAM type: YTN; PAM sequence: TTC
tgtagatacttagaaaaaaa

SEQ ID NO: 413640 - DNA, 20 bp, Artificial Sequence
  Description of Artificial Sequence: Synthetic oligonucleotide
  Target: LAMA2; (+) strand; PAM type: YTN; PAM sequence: CTG
tagatacttagaaaaaaaga

SEQ ID NO: 413641 - DNA, 20 bp, Artificial Sequence
  Description of Artificial Sequence: Synthetic oligonucleotide
  Target: LAMA2; (+) strand; PAM type: YTN; PAM sequence: CTT
agaaaaaaagattaattttg

SEQ ID NO: 413642 - DNA, 20 bp, Artificial Sequence
  Description of Artificial Sequence: Synthetic oligonucleotide
  Target: LAMA2; (+) strand; PAM type: YTN; PAM sequence: TTA
gaaaaaaagattaattttgt

SEQ ID NO: 413643 - DNA, 20 bp, Artificial Sequence
  Description of Artificial Sequence: Synthetic oligonucleotide
  Target: LAMA2; (+) strand; PAM type: YTN; PAM sequence: TTA
attttgtttgggggatatca

SEQ ID NO: 413644 - DNA, 20 bp, Artificial Sequence
  Description of Artificial Sequence: Synthetic oligonucleotide
  Target: LAMA2; (+) strand; PAM type: YTN; PAM sequence: TTT
tgtttgggggatatcaggaa

SEQ ID NO: 413645 - DNA, 20 bp, Artificial Sequence
  Description of Artificial Sequence: Synthetic oligonucleotide
  Target: LAMA2; (+) strand; PAM type: YTN; PAM sequence: TTT
gtttgggggatatcaggaaa

SEQ ID NO: 413646 - DNA, 20 bp, Artificial Sequence
  Description of Artificial Sequence: Synthetic oligonucleotide
  Target: LAMA2; (+) strand; PAM type: YTN; PAM sequence: TTG
tttgggggatatcaggaaac

SEQ ID NO: 413647 - DNA, 20 bp, Artificial Sequence
  Description of Artificial Sequence: Synthetic oligonucleotide
  Target: LAMA2; (+) strand; PAM type: YTN; PAM sequence: TTT
gggggatatcaggaaacgtt

SEQ ID NO: 413648 - DNA, 20 bp, Artificial Sequence
  Description of Artificial Sequence: Synthetic oligonucleotide
  Target: LAMA2; (+) strand; PAM type: YTN; PAM sequence: TTG
ggggatatcaggaaacgttt

SEQ ID NO: 413649 - DNA, 20 bp, Artificial Sequence
  Description of Artificial Sequence: Synthetic oligonucleotide
  Target: LAMA2; (+) strand; PAM type: YTN; PAM sequence: TTT
catggaggaatcagcatttg

SEQ ID NO: 413650 - DNA, 20 bp, Artificial Sequence
  Description of Artificial Sequence: Synthetic oligonucleotide
  Target: LAMA2; (+) strand; PAM type: YTN; PAM sequence: TTC
atggaggaatcagcatttga

SEQ ID NO: 413651 - DNA, 20 bp, Artificial Sequence
  Description of Artificial Sequence: Synthetic oligonucleotide
  Target: LAMA2; (+) strand; PAM type: YTN; PAM sequence: TTT
gagcaaggcttcaggtgatt

SEQ ID NO: 413652 - DNA, 20 bp, Artificial Sequence
  Description of Artificial Sequence: Synthetic oligonucleotide
  Target: LAMA2; (+) strand; PAM type: YTN; PAM sequence: TTG
agcaaggcttcaggtgattt

SEQ ID NO: 413653 - DNA, 20 bp, Artificial Sequence
  Description of Artificial Sequence: Synthetic oligonucleotide
  Target: LAMA2; (+) strand; PAM type: YTN; PAM sequence: CTT
caggtgattttaacactccc

SEQ ID NO: 413654 - DNA, 20 bp, Artificial Sequence
  Description of Artificial Sequence: Synthetic oligonucleotide
  Target: LAMA2; (+) strand; PAM type: YTN; PAM sequence: TTC
aggtgattttaacactccca

SEQ ID NO: 413655 - DNA, 20 bp, Artificial Sequence
  Description of Artificial Sequence: Synthetic oligonucleotide
  Target: LAMA2; (+) strand; PAM type: YTN; PAM sequence: TTT
taacactcccatacaaagta

SEQ ID NO: 413656 - DNA, 20 bp, Artificial Sequence
  Description of Artificial Sequence: Synthetic oligonucleotide
  Target: LAMA2; (+) strand; PAM type: YTN; PAM sequence: TTT
aacactcccatacaaagtag

SEQ ID NO: 413657 - DNA, 20 bp, Artificial Sequence
  Description of Artificial Sequence: Synthetic oligonucleotide
  Target: LAMA2; (+) strand; PAM type: YTN; PAM sequence: TTA
acactcccatacaaagtagt

SEQ ID NO: 413658 - DNA, 20 bp, Artificial Sequence
  Description of Artificial Sequence: Synthetic oligonucleotide
  Target: LAMA2; (+) strand; PAM type: YTN; PAM sequence: CTC
ccatacaaagtagtgggtga

SEQ ID NO: 413659 - DNA, 20 bp, Artificial Sequence
  Description of Artificial Sequence: Synthetic oligonucleotide
  Target: LAMA2; (+) strand; PAM type: YTN; PAM sequence: CTC
caccaaaatataggtaggaa

SEQ ID NO: 413660 - DNA, 20 bp, Artificial Sequence
  Description of Artificial Sequence: Synthetic oligonucleotide
  Target: LAMA2; (+) strand; PAM type: YTN; PAM sequence: CTA
cagggaagcagaaaacagaa

SEQ ID NO: 413661 - DNA, 20 bp, Artificial Sequence
  Description of Artificial Sequence: Synthetic oligonucleotide
  Target: LAMA2; (+) strand; PAM type: YTN; PAM sequence: TTA
aatattgaaacgttacaggt

SEQ ID NO: 413662 - DNA, 20 bp, Artificial Sequence
  Description of Artificial Sequence: Synthetic oligonucleotide
  Target: LAMA2; (+) strand; PAM type: YTN; PAM sequence: TTG
aaacgttacaggttatgctg

SEQ ID NO: 413663 - DNA, 20 bp, Artificial Sequence
  Description of Artificial Sequence: Synthetic oligonucleotide
  Target: LAMA2; (+) strand; PAM type: YTN; PAM sequence: TTA
caggttatgctgaaccccga

SEQ ID NO: 413664 - DNA, 20 bp, Artificial Sequence
  Description of Artificial Sequence: Synthetic oligonucleotide
  Target: LAMA2; (+) strand; PAM type: YTN; PAM sequence: TTA
tgctgaaccccgaattccat

SEQ ID NO: 413665 - DNA, 20 bp, Artificial Sequence
  Description of Artificial Sequence: Synthetic oligonucleotide
  Target: LAMA2; (+) strand; PAM type: YTN; PAM sequence: CTG
aaccccgaattccatgtgct

SEQ ID NO: 413666 - DNA, 20 bp, Artificial Sequence
  Description of Artificial Sequence: Synthetic oligonucleotide
  Target: LAMA2; (+) strand; PAM type: YTN; PAM sequence: TTC
catgtgctatgaaagtctaa

SEQ ID NO: 413667 - DNA, 20 bp, Artificial Sequence
  Description of Artificial Sequence: Synthetic oligonucleotide
  Target: LAMA2; (+) strand; PAM type: YTN; PAM sequence: CTA
tgaaagtctaaaagcttccc

SEQ ID NO: 413668 - DNA, 20 bp, Artificial Sequence
  Description of Artificial Sequence: Synthetic oligonucleotide
  Target: LAMA2; (+) strand; PAM type: YTN; PAM sequence: CTA
aaagcttcccccaagatttc

SEQ ID NO: 413669 - DNA, 20 bp, Artificial Sequence
  Description of Artificial Sequence: Synthetic oligonucleotide
  Target: LAMA2; (+) strand; PAM type: YTN; PAM sequence: CTT
cccccaagatttctgcaaat

SEQ ID NO: 413670 - DNA, 20 bp, Artificial Sequence
  Description of Artificial Sequence: Synthetic oligonucleotide
  Target: LAMA2; (+) strand; PAM type: YTN; PAM sequence: TTC
ccccaagatttctgcaaatt

SEQ ID NO: 413671 - DNA, 20 bp, Artificial Sequence
  Description of Artificial Sequence: Synthetic oligonucleotide
  Target: LAMA2; (+) strand; PAM type: YTN; PAM sequence: TTT
ctgcaaattcacagatggct

SEQ ID NO: 413672 - DNA, 20 bp, Artificial Sequence
  Description of Artificial Sequence: Synthetic oligonucleotide
  Target: LAMA2; (+) strand; PAM type: YTN; PAM sequence: TTC
tgcaaattcacagatggctg

SEQ ID NO: 413673 - DNA, 20 bp, Artificial Sequence
  Description of Artificial Sequence: Synthetic oligonucleotide
  Target: LAMA2; (+) strand; PAM type: YTN; PAM sequence: CTG
caaattcacagatggctggc

SEQ ID NO: 413674 - DNA, 20 bp, Artificial Sequence
  Description of Artificial Sequence: Synthetic oligonucleotide
  Target: LAMA2; (+) strand; PAM type: YTN; PAM sequence: TTC
acagatggctggcattctct

SEQ ID NO: 413675 - DNA, 20 bp, Artificial Sequence
  Description of Artificial Sequence: Synthetic oligonucleotide
  Target: LAMA2; (+) strand; PAM type: YTN; PAM sequence: CTG
gcattctcttagtcaaattt

SEQ ID NO: 413676 - DNA, 20 bp, Artificial Sequence
  Description of Artificial Sequence: Synthetic oligonucleotide
  Target: LAMA2; (+) strand; PAM type: YTN; PAM sequence: TTC
tcttagtcaaattttatgac

SEQ ID NO: 413677 - DNA, 20 bp, Artificial Sequence
  Description of Artificial Sequence: Synthetic oligonucleotide
  Target: LAMA2; (+) strand; PAM type: YTN; PAM sequence: CTC
ttagtcaaattttatgacaa

SEQ ID NO: 413678 - DNA, 20 bp, Artificial Sequence
  Description of Artificial Sequence: Synthetic oligonucleotide
  Target: LAMA2; (+) strand; PAM type: YTN; PAM sequence: CTT
agtcaaattttatgacaagt

SEQ ID NO: 413679 - DNA, 20 bp, Artificial Sequence
  Description of Artificial Sequence: Synthetic oligonucleotide
  Target: LAMA2; (+) strand; PAM type: YTN; PAM sequence: TTA
gtcaaattttatgacaagtt

SEQ ID NO: 413680 - DNA, 20 bp, Artificial Sequence
  Description of Artificial Sequence: Synthetic oligonucleotide
  Target: LAMA2; (+) strand; PAM type: YTN; PAM sequence: TTT
tatgacaagtttcagcttca

SEQ ID NO: 413681 - DNA, 20 bp, Artificial Sequence
  Description of Artificial Sequence: Synthetic oligonucleotide
  Target: LAMA2; (+) strand; PAM type: YTN; PAM sequence: TTT
atgacaagtttcagcttcag

SEQ ID NO: 413682 - DNA, 20 bp, Artificial Sequence
  Description of Artificial Sequence: Synthetic oligonucleotide
  Target: LAMA2; (+) strand; PAM type: YTN; PAM sequence: TTA
tgacaagtttcagcttcagc

SEQ ID NO: 413683 - DNA, 20 bp, Artificial Sequence
  Description of Artificial Sequence: Synthetic oligonucleotide
  Target: LAMA2; (+) strand; PAM type: YTN; PAM sequence: TTT
cagcttcagcttttgcactt

SEQ ID NO: 413684 - DNA, 20 bp, Artificial Sequence
  Description of Artificial Sequence: Synthetic oligonucleotide
  Target: LAMA2; (+) strand; PAM type: YTN; PAM sequence: TTC
agcttcagcttttgcactta

SEQ ID NO: 413685 - DNA, 20 bp, Artificial Sequence
  Description of Artificial Sequence: Synthetic oligonucleotide
  Target: LAMA2; (+) strand; PAM type: YTN; PAM sequence: CTT
cagcttttgcacttaatgga

SEQ ID NO: 413686 - DNA, 20 bp, Artificial Sequence
  Description of Artificial Sequence: Synthetic oligonucleotide
  Target: LAMA2; (+) strand; PAM type: YTN; PAM sequence: TTC
agcttttgcacttaatggat

SEQ ID NO: 413687 - DNA, 20 bp, Artificial Sequence
  Description of Artificial Sequence: Synthetic oligonucleotide
  Target: LAMA2; (+) strand; PAM type: YTN; PAM sequence: CTT
ttgcacttaatggattgact

SEQ ID NO: 413688 - DNA, 20 bp, Artificial Sequence
  Description of Artificial Sequence: Synthetic oligonucleotide
  Target: LAMA2; (+) strand; PAM type: YTN; PAM sequence: TTT
tgcacttaatggattgactt

SEQ ID NO: 413689 - DNA, 20 bp, Artificial Sequence
  Description of Artificial Sequence: Synthetic oligonucleotide
  Target: LAMA2; (+) strand; PAM type: YTN; PAM sequence: TTT
gcacttaatggattgacttg

SEQ ID NO: 413690 - DNA, 20 bp, Artificial Sequence
  Description of Artificial Sequence: Synthetic oligonucleotide
  Target: LAMA2; (+) strand; PAM type: YTN; PAM sequence: TTG
cacttaatggattgacttgc

SEQ ID NO: 413691 - DNA, 20 bp, Artificial Sequence
  Description of Artificial Sequence: Synthetic oligonucleotide
  Target: LAMA2; (+) strand; PAM type: YTN; PAM sequence: CTT
aatggattgacttgccatcc

SEQ ID NO: 413692 - DNA, 20 bp, Artificial Sequence
  Description of Artificial Sequence: Synthetic oligonucleotide
  Target: LAMA2; (+) strand; PAM type: YTN; PAM sequence: TTA
atggattgacttgccatcct

SEQ ID NO: 413693 - DNA, 20 bp, Artificial Sequence
  Description of Artificial Sequence: Synthetic oligonucleotide
  Target: LAMA2; (+) strand; PAM type: YTN; PAM sequence: TTG
acttgccatcctgcctgggc

SEQ ID NO: 413694 - DNA, 20 bp, Artificial Sequence
  Description of Artificial Sequence: Synthetic oligonucleotide
  Target: LAMA2; (+) strand; PAM type: YTN; PAM sequence: CTT
gccatcctgcctgggctctt

SEQ ID NO: 413695 - DNA, 20 bp, Artificial Sequence
  Description of Artificial Sequence: Synthetic oligonucleotide
  Target: LAMA2; (+) strand; PAM type: YTN; PAM sequence: TTG
ccatcctgcctgggctctta

SEQ ID NO: 413696 - DNA, 20 bp, Artificial Sequence
  Description of Artificial Sequence: Synthetic oligonucleotide
  Target: LAMA2; (+) strand; PAM type: YTN; PAM sequence: CTG
cctgggctcttataattctg

SEQ ID NO: 413697 - DNA, 20 bp, Artificial Sequence
  Description of Artificial Sequence: Synthetic oligonucleotide
  Target: LAMA2; (+) strand; PAM type: YTN; PAM sequence: CTG
ggctcttataattctggatc

SEQ ID NO: 413698 - DNA, 20 bp, Artificial Sequence
  Description of Artificial Sequence: Synthetic oligonucleotide
  Target: LAMA2; (+) strand; PAM type: YTN; PAM sequence: CTC
ttataattctggatcaaaca

SEQ ID NO: 413699 - DNA, 20 bp, Artificial Sequence
  Description of Artificial Sequence: Synthetic oligonucleotide
  Target: LAMA2; (+) strand; PAM type: YTN; PAM sequence: CTT
ataattctggatcaaacaaa

SEQ ID NO: 413700 - DNA, 20 bp, Artificial Sequence
  Description of Artificial Sequence: Synthetic oligonucleotide
  Target: LAMA2; (+) strand; PAM type: YTN; PAM sequence: TTA
taattctggatcaaacaaaa

SEQ ID NO: 413701 - DNA, 20 bp, Artificial Sequence
  Description of Artificial Sequence: Synthetic oligonucleotide
  Target: LAMA2; (+) strand; PAM type: YTN; PAM sequence: TTC
tggatcaaacaaaaccagaa

SEQ ID NO: 413702 - DNA, 20 bp, Artificial Sequence
  Description of Artificial Sequence: Synthetic oligonucleotide
  Target: LAMA2; (+) strand; PAM type: YTN; PAM sequence: CTG
gatcaaacaaaaccagaaaa

SEQ ID NO: 413703 - DNA, 20 bp, Artificial Sequence
  Description of Artificial Sequence: Synthetic oligonucleotide
  Target: LAMA2; (+) strand; PAM type: YTN; PAM sequence: TTA
ctcacttcctctgtttctaa

SEQ ID NO: 413704 - DNA, 20 bp, Artificial Sequence
  Description of Artificial Sequence: Synthetic oligonucleotide
  Target: LAMA2; (+) strand; PAM type: YTN; PAM sequence: CTC
acttcctctgtttctaatgt

SEQ ID NO: 413705 - DNA, 20 bp, Artificial Sequence
  Description of Artificial Sequence: Synthetic oligonucleotide
  Target: LAMA2; (+) strand; PAM type: YTN; PAM sequence: CTT
cctctgtttctaatgtccct

SEQ ID NO: 413706 - DNA, 20 bp, Artificial Sequence
  Description of Artificial Sequence: Synthetic oligonucleotide
  Target: LAMA2; (+) strand; PAM type: YTN; PAM sequence: TTC
ctctgtttctaatgtccctt

SEQ ID NO: 413707 - DNA, 20 bp, Artificial Sequence
  Description of Artificial Sequence: Synthetic oligonucleotide
  Target: LAMA2; (+) strand; PAM type: YTN; PAM sequence: CTC
tgtttctaatgtcccttgcc

SEQ ID NO: 413708 - DNA, 20 bp, Artificial Sequence
  Description of Artificial Sequence: Synthetic oligonucleotide
  Target: LAMA2; (+) strand; PAM type: YTN; PAM sequence: CTG
tttctaatgtcccttgccat

SEQ ID NO: 413709 - DNA, 20 bp, Artificial Sequence
  Description of Artificial Sequence: Synthetic oligonucleotide
  Target: LAMA2; (+) strand; PAM type: YTN; PAM sequence: TTT
ctaatgtcccttgccatccc

SEQ ID NO: 413710 - DNA, 20 bp, Artificial Sequence
  Description of Artificial Sequence: Synthetic oligonucleotide
  Target: LAMA2; (+) strand; PAM type: YTN; PAM sequence: TTC
taatgtcccttgccatcccc

SEQ ID NO: 413711 - DNA, 20 bp, Artificial Sequence
  Description of Artificial Sequence: Synthetic oligonucleotide
  Target: LAMA2; (+) strand; PAM type: YTN; PAM sequence: CTA
atgtcccttgccatcccctg

SEQ ID NO: 413712 - DNA, 20 bp, Artificial Sequence
  Description of Artificial Sequence: Synthetic oligonucleotide
  Target: LAMA2; (+) strand; PAM type: YTN; PAM sequence: CTT
gccatcccctgaacacacag

SEQ ID NO: 413713 - DNA, 20 bp, Artificial Sequence
  Description of Artificial Sequence: Synthetic oligonucleotide
  Target: LAMA2; (+) strand; PAM type: YTN; PAM sequence: TTG
ccatcccctgaacacacagt

SEQ ID NO: 413714 - DNA, 20 bp, Artificial Sequence
  Description of Artificial Sequence: Synthetic oligonucleotide
  Target: LAMA2; (+) strand; PAM type: YTN; PAM sequence: CTG
aacacacagtgtaatacaat

SEQ ID NO: 413715 - DNA, 20 bp, Artificial Sequence
  Description of Artificial Sequence: Synthetic oligonucleotide
  Target: LAMA2; (+) strand; PAM type: YTN; PAM sequence: TTT
acataagacttgggtggtca

SEQ ID NO: 413716 - DNA, 20 bp, Artificial Sequence
  Description of Artificial Sequence: Synthetic oligonucleotide
  Target: LAMA2; (+) strand; PAM type: YTN; PAM sequence: TTA
cataagacttgggtggtcag

SEQ ID NO: 413717 - DNA, 20 bp, Artificial Sequence
  Description of Artificial Sequence: Synthetic oligonucleotide
  Target: LAMA2; (+) strand; PAM type: YTN; PAM sequence: CTT
gggtggtcagaagagatcac

SEQ ID NO: 413718 - DNA, 20 bp, Artificial Sequence
  Description of Artificial Sequence: Synthetic oligonucleotide
  Target: LAMA2; (+) strand; PAM type: YTN; PAM sequence: TTG
ggtggtcagaagagatcact

SEQ ID NO: 413719 - DNA, 20 bp, Artificial Sequence
  Description of Artificial Sequence: Synthetic oligonucleotide
  Target: LAMA2; (+) strand; PAM type: YTN; PAM sequence: CTT
cactggaaaacatacaattc

SEQ ID NO: 413720 - DNA, 20 bp, Artificial Sequence
  Description of Artificial Sequence: Synthetic oligonucleotide
  Target: LAMA2; (+) strand; PAM type: YTN; PAM sequence: TTC
actggaaaacatacaattca

SEQ ID NO: 413721 - DNA, 20 bp, Artificial Sequence
  Description of Artificial Sequence: Synthetic oligonucleotide
  Target: LAMA2; (+) strand; PAM type: YTN; PAM sequence: CTG
gaaaacatacaattcatctt

SEQ ID NO: 413722 - DNA, 20 bp, Artificial Sequence
  Description of Artificial Sequence: Synthetic oligonucleotide
  Target: LAMA2; (+) strand; PAM type: YTN; PAM sequence: TTC
atcttaacctttgacatctt

SEQ ID NO: 413723 - DNA, 20 bp, Artificial Sequence
  Description of Artificial Sequence: Synthetic oligonucleotide
  Target: LAMA2; (+) strand; PAM type: YTN; PAM sequence: CTT
aacctttgacatctttgttc

SEQ ID NO: 413724 - DNA, 20 bp, Artificial Sequence
  Description of Artificial Sequence: Synthetic oligonucleotide
  Target: LAMA2; (+) strand; PAM type: YTN; PAM sequence: TTA
acctttgacatctttgttct

SEQ ID NO: 413725 - DNA, 20 bp, Artificial Sequence
  Description of Artificial Sequence: Synthetic oligonucleotide
  Target: LAMA2; (+) strand; PAM type: YTN; PAM sequence: CTT
tgacatctttgttcttaaaa

SEQ ID NO: 413726 - DNA, 20 bp, Artificial Sequence
  Description of Artificial Sequence: Synthetic oligonucleotide
  Target: LAMA2; (+) strand; PAM type: YTN; PAM sequence: TTT
gacatctttgttcttaaaag

SEQ ID NO: 413727 - DNA, 20 bp, Artificial Sequence
  Description of Artificial Sequence: Synthetic oligonucleotide
  Target: LAMA2; (+) strand; PAM type: YTN; PAM sequence: TTG
acatctttgttcttaaaagt

SEQ ID NO: 413728 - DNA, 20 bp, Artificial Sequence
  Description of Artificial Sequence: Synthetic oligonucleotide
  Target: LAMA2; (+) strand; PAM type: YTN; PAM sequence: CTT
tgttcttaaaagttttccag

SEQ ID NO: 413729 - DNA, 20 bp, Artificial Sequence
  Description of Artificial Sequence: Synthetic oligonucleotide
  Target: LAMA2; (+) strand; PAM type: YTN; PAM sequence: TTT
gttcttaaaagttttccagc

SEQ ID NO: 413730 - DNA, 20 bp, Artificial Sequence
  Description of Artificial Sequence: Synthetic oligonucleotide
  Target: LAMA2; (+) strand; PAM type: YTN; PAM sequence: TTG
ttcttaaaagttttccagcg

SEQ ID NO: 413731 - DNA, 20 bp, Artificial Sequence
  Description of Artificial Sequence: Synthetic oligonucleotide
  Target: LAMA2; (+) strand; PAM type: YTN; PAM sequence: TTC
ttaaaagttttccagcgacc

SEQ ID NO: 413732 - DNA, 20 bp, Artificial Sequence
  Description of Artificial Sequence: Synthetic oligonucleotide
  Target: LAMA2; (+) strand; PAM type: YTN; PAM sequence: CTT
aaaagttttccagcgaccca

SEQ ID NO: 413733 - DNA, 20 bp, Artificial Sequence
  Description of Artificial Sequence: Synthetic oligonucleotide
  Target: LAMA2; (+) strand; PAM type: YTN; PAM sequence: TTA
aaagttttccagcgacccaa

SEQ ID NO: 413734 - DNA, 20 bp, Artificial Sequence
  Description of Artificial Sequence: Synthetic oligonucleotide
  Target: LAMA2; (+) strand; PAM type: YTN; PAM sequence: TTT
tccagcgacccaatcactgg

SEQ ID NO: 413735 - DNA, 20 bp, Artificial Sequence
  Description of Artificial Sequence: Synthetic oligonucleotide
  Target: LAMA2; (+) strand; PAM type: YTN; PAM sequence: TTT
ccagcgacccaatcactggg

SEQ ID NO: 413736 - DNA, 20 bp, Artificial Sequence
  Description of Artificial Sequence: Synthetic oligonucleotide
  Target: LAMA2; (+) strand; PAM type: YTN; PAM sequence: TTC
cagcgacccaatcactgggg

SEQ ID NO: 413737 - DNA, 20 bp, Artificial Sequence
  Description of Artificial Sequence: Synthetic oligonucleotide
  Target: LAMA2; (+) strand; PAM type: YTN; PAM sequence: CTG
gggcttttttttggcctctt

SEQ ID NO: 413738 - DNA, 20 bp, Artificial Sequence
  Description of Artificial Sequence: Synthetic oligonucleotide
  Target: LAMA2; (+) strand; PAM type: YTN; PAM sequence: CTT
ttttttggcctcttcattcc

SEQ ID NO: 413739 - DNA, 20 bp, Artificial Sequence
  Description of Artificial Sequence: Synthetic oligonucleotide
  Target: LAMA2; (+) strand; PAM type: YTN; PAM sequence: TTT
tttttggcctcttcattcct

SEQ ID NO: 413740 - DNA, 20 bp, Artificial Sequence
  Description of Artificial Sequence: Synthetic oligonucleotide
  Target: LAMA2; (+) strand; PAM type: YTN; PAM sequence: TTT
ttttggcctcttcattcctt

SEQ ID NO: 413741 - DNA, 20 bp, Artificial Sequence
  Description of Artificial Sequence: Synthetic oligonucleotide
  Target: LAMA2; (+) strand; PAM type: YTN; PAM sequence: TTT
tttggcctcttcattccttc

SEQ ID NO: 413742 - DNA, 20 bp, Artificial Sequence
  Description of Artificial Sequence: Synthetic oligonucleotide
  Target: LAMA2; (+) strand; PAM type: YTN; PAM sequence: TTT
ttggcctcttcattccttct

SEQ ID NO: 413743 - DNA, 20 bp, Artificial Sequence
  Description of Artificial Sequence: Synthetic oligonucleotide
  Target: LAMA2; (+) strand; PAM type: YTN; PAM sequence: TTT
tggcctcttcattccttctg

SEQ ID NO: 413744 - DNA, 20 bp, Artificial Sequence
  Description of Artificial Sequence: Synthetic oligonucleotide
  Target: LAMA2; (+) strand; PAM type: YTN; PAM sequence: TTT
ggcctcttcattccttctgt

SEQ ID NO: 413745 - DNA, 20 bp, Artificial Sequence
  Description of Artificial Sequence: Synthetic oligonucleotide
  Target: LAMA2; (+) strand; PAM type: YTN; PAM sequence: TTG
gcctcttcattccttctgtc

SEQ ID NO: 413746 - DNA, 20 bp, Artificial Sequence
  Description of Artificial Sequence: Synthetic oligonucleotide
  Target: LAMA2; (+) strand; PAM type: YTN; PAM sequence: CTC
ttcattccttctgtcctcag

SEQ ID NO: 413747 - DNA, 20 bp, Artificial Sequence
  Description of Artificial Sequence: Synthetic oligonucleotide
  Target: LAMA2; (+) strand; PAM type: YTN; PAM sequence: CTT
cattccttctgtcctcagcc

SEQ ID NO: 413748 - DNA, 20 bp, Artificial Sequence
  Description of Artificial Sequence: Synthetic oligonucleotide
  Target: LAMA2; (+) strand; PAM type: YTN; PAM sequence: TTC
attccttctgtcctcagccg

SEQ ID NO: 413749 - DNA, 20 bp, Artificial Sequence
  Description of Artificial Sequence: Synthetic oligonucleotide
  Target: LAMA2; (+) strand; PAM type: YTN; PAM sequence: TTC
cttctgtcctcagccgaact

SEQ ID NO: 413750 - DNA, 20 bp, Artificial Sequence
  Description of Artificial Sequence: Synthetic oligonucleotide
  Target: LAMA2; (+) strand; PAM type: YTN; PAM sequence: CTT
ctgtcctcagccgaacttcc

SEQ ID NO: 413751 - DNA, 20 bp, Artificial Sequence
  Description of Artificial Sequence: Synthetic oligonucleotide
  Target: LAMA2; (+) strand; PAM type: YTN; PAM sequence: TTC
tgtcctcagccgaacttcct

SEQ ID NO: 413752 - DNA, 20 bp, Artificial Sequence
  Description of Artificial Sequence: Synthetic oligonucleotide
  Target: LAMA2; (+) strand; PAM type: YTN; PAM sequence: CTG
tcctcagccgaacttcctca

SEQ ID NO: 413753 - DNA, 20 bp, Artificial Sequence
  Description of Artificial Sequence: Synthetic oligonucleotide
  Target: LAMA2; (+) strand; PAM type: YTN; PAM sequence: CTC
agccgaacttcctcatgtca

SEQ ID NO: 413754 - DNA, 20 bp, Artificial Sequence
  Description of Artificial Sequence: Synthetic oligonucleotide
  Target: LAMA2; (+) strand; PAM type: YTN; PAM sequence: CTT
cctcatgtcattcctctctt

SEQ ID NO: 413755 - DNA, 20 bp, Artificial Sequence
  Description of Artificial Sequence: Synthetic oligonucleotide
  Target: LAMA2; (+) strand; PAM type: YTN; PAM sequence: TTC
ctcatgtcattcctctcttc

SEQ ID NO: 413756 - DNA, 20 bp, Artificial Sequence
  Description of Artificial Sequence: Synthetic oligonucleotide
  Target: LAMA2; (+) strand; PAM type: YTN; PAM sequence: CTC
atgtcattcctctcttctcc

SEQ ID NO: 413757 - DNA, 20 bp, Artificial Sequence
  Description of Artificial Sequence: Synthetic oligonucleotide
  Target: LAMA2; (+) strand; PAM type: YTN; PAM sequence: TTC
ctctcttctccttacttctc

SEQ ID NO: 413758 - DNA, 20 bp, Artificial Sequence
  Description of Artificial Sequence: Synthetic oligonucleotide
  Target: LAMA2; (+) strand; PAM type: YTN; PAM sequence: CTC
tcttctccttacttctccct

SEQ ID NO: 413759 - DNA, 20 bp, Artificial Sequence
  Description of Artificial Sequence: Synthetic oligonucleotide
  Target: LAMA2; (+) strand; PAM type: YTN; PAM sequence: CTC
ttctccttacttctcccttt

SEQ ID NO: 413760 - DNA, 20 bp, Artificial Sequence
  Description of Artificial Sequence: Synthetic oligonucleotide
  Target: LAMA2; (+) strand; PAM type: YTN; PAM sequence: CTT
ctccttacttctccctttct

SEQ ID NO: 413761 - DNA, 20 bp, Artificial Sequence
  Description of Artificial Sequence: Synthetic oligonucleotide
  Target: LAMA2; (+) strand; PAM type: YTN; PAM sequence: TTC
tccttacttctccctttctg

SEQ ID NO: 413762 - DNA, 20 bp, Artificial Sequence
  Description of Artificial Sequence: Synthetic oligonucleotide
  Target: LAMA2; (+) strand; PAM type: YTN; PAM sequence: CTC
cttacttctccctttctgtt

SEQ ID NO: 413763 - DNA, 20 bp, Artificial Sequence
  Description of Artificial Sequence: Synthetic oligonucleotide
  Target: LAMA2; (+) strand; PAM type: YTN; PAM sequence: CTT
acttctccctttctgtttta

SEQ ID NO: 413764 - DNA, 20 bp, Artificial Sequence
  Description of Artificial Sequence: Synthetic oligonucleotide
  Target: LAMA2; (+) strand; PAM type: YTN; PAM sequence: TTA
cttctccctttctgttttat

SEQ ID NO: 413765 - DNA, 20 bp, Artificial Sequence
  Description of Artificial Sequence: Synthetic oligonucleotide
  Target: LAMA2; (+) strand; PAM type: YTN; PAM sequence: CTT
ctccctttctgttttatttt

SEQ ID NO: 413766 - DNA, 20 bp, Artificial Sequence
  Description of Artificial Sequence: Synthetic oligonucleotide
  Target: LAMA2; (+) strand; PAM type: YTN; PAM sequence: TTC
tccctttctgttttattttg

SEQ ID NO: 413767 - DNA, 20 bp, Artificial Sequence
  Description of Artificial Sequence: Synthetic oligonucleotide
  Target: LAMA2; (+) strand; PAM type: YTN; PAM sequence: CTC
cctttctgttttattttgca

SEQ ID NO: 413768 - DNA, 20 bp, Artificial Sequence
  Description of Artificial Sequence: Synthetic oligonucleotide
  Target: LAMA2; (+) strand; PAM type: YTN; PAM sequence: CTT
tctgttttattttgcagagc

SEQ ID NO: 413769 - DNA, 20 bp, Artificial Sequence
  Description of Artificial Sequence: Synthetic oligonucleotide
  Target: LAMA2; (+) strand; PAM type: YTN; PAM sequence: TTT
ctgttttattttgcagagca

SEQ ID NO: 413770 - DNA, 20 bp, Artificial Sequence
  Description of Artificial Sequence: Synthetic oligonucleotide
  Target: LAMA2; (+) strand; PAM type: YTN; PAM sequence: TTC
tgttttattttgcagagcaa

SEQ ID NO: 413771 - DNA, 20 bp, Artificial Sequence
  Description of Artificial Sequence: Synthetic oligonucleotide
  Target: LAMA2; (+) strand; PAM type: YTN; PAM sequence: CTG
ttttattttgcagagcaatt

SEQ ID NO: 413772 - DNA, 20 bp, Artificial Sequence
  Description of Artificial Sequence: Synthetic oligonucleotide
  Target: LAMA2; (+) strand; PAM type: YTN; PAM sequence: TTT
tattttgcagagcaattcag

SEQ ID NO: 413773 - DNA, 20 bp, Artificial Sequence
  Description of Artificial Sequence: Synthetic oligonucleotide
  Target: LAMA2; (+) strand; PAM type: YTN; PAM sequence: TTT
attttgcagagcaattcagc

SEQ ID NO: 413774 - DNA, 20 bp, Artificial Sequence
  Description of Artificial Sequence: Synthetic oligonucleotide
  Target: LAMA2; (+) strand; PAM type: YTN; PAM sequence: TTA
ttttgcagagcaattcagct

SEQ ID NO: 413775 - DNA, 20 bp, Artificial Sequence
  Description of Artificial Sequence: Synthetic oligonucleotide
  Target: LAMA2; (+) strand; PAM type: YTN; PAM sequence: TTT
tgcagagcaattcagcttct

SEQ ID NO: 413776 - DNA, 20 bp, Artificial Sequence
  Description of Artificial Sequence: Synthetic oligonucleotide
  Target: LAMA2; (+) strand; PAM type: YTN; PAM sequence: TTT
gcagagcaattcagcttctt

SEQ ID NO: 413777 - DNA, 20 bp, Artificial Sequence
  Description of Artificial Sequence: Synthetic oligonucleotide
  Target: LAMA2; (+) strand; PAM type: YTN; PAM sequence: TTG
cagagcaattcagcttcttc

SEQ ID NO: 413778 - DNA, 20 bp, Artificial Sequence
  Description of Artificial Sequence: Synthetic oligonucleotide
  Target: LAMA2; (+) strand; PAM type: YTN; PAM sequence: TTC
agcttcttctaccctttact

SEQ ID NO: 413779 - DNA, 20 bp, Artificial Sequence
  Description of Artificial Sequence: Synthetic oligonucleotide
  Target: LAMA2; (+) strand; PAM type: YTN; PAM sequence: CTT
cttctaccctttactttatt

SEQ ID NO: 413780 - DNA, 20 bp, Artificial Sequence
  Description of Artificial Sequence: Synthetic oligonucleotide
  Target: LAMA2; (+) strand; PAM type: YTN; PAM sequence: TTC
ttctaccctttactttattt

SEQ ID NO: 413781 - DNA, 20 bp, Artificial Sequence
  Description of Artificial Sequence: Synthetic oligonucleotide
  Target: LAMA2; (+) strand; PAM type: YTN; PAM sequence: CTT
ctaccctttactttattttt

SEQ ID NO: 413782 - DNA, 20 bp, Artificial Sequence
  Description of Artificial Sequence: Synthetic oligonucleotide
  Target: LAMA2; (+) strand; PAM type: YTN; PAM sequence: TTC
taccctttactttatttttt

SEQ ID NO: 413783 - DNA, 20 bp, Artificial Sequence
  Description of Artificial Sequence: Synthetic oligonucleotide
  Target: LAMA2; (+) strand; PAM type: YTN; PAM sequence: CTA
ccctttactttattttttcg

SEQ ID NO: 413784 - DNA, 20 bp, Artificial Sequence
  Description of Artificial Sequence: Synthetic oligonucleotide
  Target: LAMA2; (+) strand; PAM type: YTN; PAM sequence: CTT
tactttattttttcgtttat

SEQ ID NO: 413785 - DNA, 20 bp, Artificial Sequence
  Description of Artificial Sequence: Synthetic oligonucleotide
  Target: LAMA2; (+) strand; PAM type: YTN; PAM sequence: TTT
actttattttttcgtttatt

SEQ ID NO: 413786 - DNA, 20 bp, Artificial Sequence
  Description of Artificial Sequence: Synthetic oligonucleotide
  Target: LAMA2; (+) strand; PAM type: YTN; PAM sequence: TTA
ctttattttttcgtttattt

SEQ ID NO: 413787 - DNA, 20 bp, Artificial Sequence
  Description of Artificial Sequence: Synthetic oligonucleotide
  Target: LAMA2; (+) strand; PAM type: YTN; PAM sequence: CTT
tattttttcgtttatttcca

SEQ ID NO: 413788 - DNA, 20 bp, Artificial Sequence
  Description of Artificial Sequence: Synthetic oligonucleotide
  Target: LAMA2; (+) strand; PAM type: YTN; PAM sequence: TTT
attttttcgtttatttccag

SEQ ID NO: 413789 - DNA, 20 bp, Artificial Sequence
  Description of Artificial Sequence: Synthetic oligonucleotide
  Target: LAMA2; (+) strand; PAM type: YTN; PAM sequence: TTA
ttttttcgtttatttccaga

SEQ ID NO: 413790 - DNA, 20 bp, Artificial Sequence
  Description of Artificial Sequence: Synthetic oligonucleotide
  Target: LAMA2; (+) strand; PAM type: YTN; PAM sequence: TTT
tttcgtttatttccagaagg

SEQ ID NO: 413791 - DNA, 20 bp, Artificial Sequence
  Description of Artificial Sequence: Synthetic oligonucleotide
  Target: LAMA2; (+) strand; PAM type: YTN; PAM sequence: TTT
ttcgtttatttccagaaggg

SEQ ID NO: 413792 - DNA, 20 bp, Artificial Sequence
  Description of Artificial Sequence: Synthetic oligonucleotide
  Target: LAMA2; (+) strand; PAM type: YTN; PAM sequence: TTT
tcgtttatttccagaagggg

SEQ ID NO: 413793 - DNA, 20 bp, Artificial Sequence
  Description of Artificial Sequence: Synthetic oligonucleotide
  Target: LAMA2; (+) strand; PAM type: YTN; PAM sequence: TTT
cgtttatttccagaaggggt

SEQ ID NO: 413794 - DNA, 20 bp, Artificial Sequence
  Description of Artificial Sequence: Synthetic oligonucleotide
  Target: LAMA2; (+) strand; PAM type: YTN; PAM sequence: TTC
gtttatttccagaaggggtg

SEQ ID NO: 413795 - DNA, 20 bp, Artificial Sequence
  Description of Artificial Sequence: Synthetic oligonucleotide
  Target: LAMA2; (+) strand; PAM type: YTN; PAM sequence: TTT
atttccagaaggggtgtcac

SEQ ID NO: 413796 - DNA, 20 bp, Artificial Sequence
  Description of Artificial Sequence: Synthetic oligonucleotide
  Target: LAMA2; (+) strand; PAM type: YTN; PAM sequence: TTA
tttccagaaggggtgtcact

SEQ ID NO: 413797 - DNA, 20 bp, Artificial Sequence
  Description of Artificial Sequence: Synthetic oligonucleotide
  Target: LAMA2; (+) strand; PAM type: YTN; PAM sequence: TTT
ccagaaggggtgtcactatg

SEQ ID NO: 413798 - DNA, 20 bp, Artificial Sequence
  Description of Artificial Sequence: Synthetic oligonucleotide
  Target: LAMA2; (+) strand; PAM type: YTN; PAM sequence: TTC
cagaaggggtgtcactatgt

SEQ ID NO: 413799 - DNA, 20 bp, Artificial Sequence
  Description of Artificial Sequence: Synthetic oligonucleotide
  Target: LAMA2; (+) strand; PAM type: YTN; PAM sequence: CTA
tgttgcccaggcgcaactgg

SEQ ID NO: 413800 - DNA, 20 bp, Artificial Sequence
  Description of Artificial Sequence: Synthetic oligonucleotide
  Target: LAMA2; (+) strand; PAM type: YTN; PAM sequence: TTG
cccaggcgcaactggctagc

SEQ ID NO: 413801 - DNA, 20 bp, Artificial Sequence
  Description of Artificial Sequence: Synthetic oligonucleotide
  Target: LAMA2; (+) strand; PAM type: YTN; PAM sequence: CTG
gctagcttttattcataaaa

SEQ ID NO: 413802 - DNA, 20 bp, Artificial Sequence
  Description of Artificial Sequence: Synthetic oligonucleotide
  Target: LAMA2; (+) strand; PAM type: YTN; PAM sequence: CTA
gcttttattcataaaatctg

SEQ ID NO: 413803 - DNA, 20 bp, Artificial Sequence
  Description of Artificial Sequence: Synthetic oligonucleotide
  Target: LAMA2; (+) strand; PAM type: YTN; PAM sequence: CTT
ttattcataaaatctgctat

SEQ ID NO: 413804 - DNA, 20 bp, Artificial Sequence
  Description of Artificial Sequence: Synthetic oligonucleotide
  Target: LAMA2; (+) strand; PAM type: YTN; PAM sequence: TTT
tattcataaaatctgctata

SEQ ID NO: 413805 - DNA, 20 bp, Artificial Sequence
  Description of Artificial Sequence: Synthetic oligonucleotide
  Target: LAMA2; (+) strand; PAM type: YTN; PAM sequence: TTT
attcataaaatctgctataa

SEQ ID NO: 413806 - DNA, 20 bp, Artificial Sequence
  Description of Artificial Sequence: Synthetic oligonucleotide
  Target: LAMA2; (+) strand; PAM type: YTN; PAM sequence: TTA
ttcataaaatctgctataaa

SEQ ID NO: 413807 - DNA, 20 bp, Artificial Sequence
  Description of Artificial Sequence: Synthetic oligonucleotide
  Target: LAMA2; (+) strand; PAM type: YTN; PAM sequence: TTC
ataaaatctgctataaaccc

SEQ ID NO: 413808 - DNA, 20 bp, Artificial Sequence
  Description of Artificial Sequence: Synthetic oligonucleotide
  Target: LAMA2; (+) strand; PAM type: YTN; PAM sequence: CTG
ctataaacccacctttgcca

SEQ ID NO: 413809 - DNA, 20 bp, Artificial Sequence
  Description of Artificial Sequence: Synthetic oligonucleotide
  Target: LAMA2; (+) strand; PAM type: YTN; PAM sequence: CTA
taaacccacctttgccaatc

SEQ ID NO: 413810 - DNA, 20 bp, Artificial Sequence
  Description of Artificial Sequence: Synthetic oligonucleotide
  Target: LAMA2; (+) strand; PAM type: YTN; PAM sequence: CTT
tgccaatccaaacccatcaa

SEQ ID NO: 413811 - DNA, 20 bp, Artificial Sequence
  Description of Artificial Sequence: Synthetic oligonucleotide
  Target: LAMA2; (+) strand; PAM type: YTN; PAM sequence: TTT
gccaatccaaacccatcaag

SEQ ID NO: 413812 - DNA, 20 bp, Artificial Sequence
  Description of Artificial Sequence: Synthetic oligonucleotide
  Target: LAMA2; (+) strand; PAM type: YTN; PAM sequence: TTG
ccaatccaaacccatcaagg

SEQ ID NO: 413813 - DNA, 20 bp, Artificial Sequence
  Description of Artificial Sequence: Synthetic oligonucleotide
  Target: LAMA2; (+) strand; PAM type: YTN; PAM sequence: TTC
tcagtagaacaaaagtcttt

SEQ ID NO: 413814 - DNA, 20 bp, Artificial Sequence
  Description of Artificial Sequence: Synthetic oligonucleotide
  Target: LAMA2; (+) strand; PAM type: YTN; PAM sequence: CTC
agtagaacaaaagtctttca

SEQ ID NO: 413815 - DNA, 20 bp, Artificial Sequence
  Description of Artificial Sequence: Synthetic oligonucleotide
  Target: LAMA2; (+) strand; PAM type: YTN; PAM sequence: CTT
tcatgtaacagctaccatcc

SEQ ID NO: 413816 - DNA, 20 bp, Artificial Sequence
  Description of Artificial Sequence: Synthetic oligonucleotide
  Target: LAMA2; (+) strand; PAM type: YTN; PAM sequence: TTT
catgtaacagctaccatcct

SEQ ID NO: 413817 - DNA, 20 bp, Artificial Sequence
  Description of Artificial Sequence: Synthetic oligonucleotide
  Target: LAMA2; (+) strand; PAM type: YTN; PAM sequence: TTC
atgtaacagctaccatcctt

SEQ ID NO: 413818 - DNA, 20 bp, Artificial Sequence
  Description of Artificial Sequence: Synthetic oligonucleotide
  Target: LAMA2; (+) strand; PAM type: YTN; PAM sequence: CTA
ccatccttcattgcagacag

SEQ ID NO: 413819 - DNA, 20 bp, Artificial Sequence
  Description of Artificial Sequence: Synthetic oligonucleotide
  Target: LAMA2; (+) strand; PAM type: YTN; PAM sequence: CTT
cattgcagacagccgtggct

SEQ ID NO: 413820 - DNA, 20 bp, Artificial Sequence
  Description of Artificial Sequence: Synthetic oligonucleotide
  Target: LAMA2; (+) strand; PAM type: YTN; PAM sequence: TTC
attgcagacagccgtggcta

SEQ ID NO: 413821 - DNA, 20 bp, Artificial Sequence
  Description of Artificial Sequence: Synthetic oligonucleotide
  Target: LAMA2; (+) strand; PAM type: YTN; PAM sequence: TTG
cagacagccgtggctacaca

SEQ ID NO: 413822 - DNA, 20 bp, Artificial Sequence
  Description of Artificial Sequence: Synthetic oligonucleotide
  Target: LAMA2; (+) strand; PAM type: YTN; PAM sequence: CTA
cacatagcatttatttcttg

SEQ ID NO: 413823 - DNA, 20 bp, Artificial Sequence
  Description of Artificial Sequence: Synthetic oligonucleotide
  Target: LAMA2; (+) strand; PAM type: YTN; PAM sequence: TTT
atttcttgcctaataaatag

SEQ ID NO: 413824 - DNA, 20 bp, Artificial Sequence
  Description of Artificial Sequence: Synthetic oligonucleotide
  Target: LAMA2; (+) strand; PAM type: YTN; PAM sequence: TTA
tttcttgcctaataaataga

SEQ ID NO: 413825 - DNA, 20 bp, Artificial Sequence
  Description of Artificial Sequence: Synthetic oligonucleotide
  Target: LAMA2; (+) strand; PAM type: YTN; PAM sequence: TTT
cttgcctaataaatagaaga

SEQ ID NO: 413826 - DNA, 20 bp, Artificial Sequence
  Description of Artificial Sequence: Synthetic oligonucleotide
  Target: LAMA2; (+) strand; PAM type: YTN; PAM sequence: TTC
ttgcctaataaatagaagac

SEQ ID NO: 413827 - DNA, 20 bp, Artificial Sequence
  Description of Artificial Sequence: Synthetic oligonucleotide
  Target: LAMA2; (+) strand; PAM type: YTN; PAM sequence: CTT
gcctaataaatagaagactt

SEQ ID NO: 413828 - DNA, 20 bp, Artificial Sequence
  Description of Artificial Sequence: Synthetic oligonucleotide
  Target: LAMA2; (+) strand; PAM type: YTN; PAM sequence: TTG
cctaataaatagaagacttg

SEQ ID NO: 413829 - DNA, 20 bp, Artificial Sequence
  Description of Artificial Sequence: Synthetic oligonucleotide
  Target: LAMA2; (+) strand; PAM type: YTN; PAM sequence: CTA
ataaatagaagacttggaga

SEQ ID NO: 413830 - DNA, 20 bp, Artificial Sequence
  Description of Artificial Sequence: Synthetic oligonucleotide
  Target: LAMA2; (+) strand; PAM type: YTN; PAM sequence: CTT
ggagaaaattcccctgagta

SEQ ID NO: 413831 - DNA, 20 bp, Artificial Sequence
  Description of Artificial Sequence: Synthetic oligonucleotide
  Target: LAMA2; (+) strand; PAM type: YTN; PAM sequence: TTG
gagaaaattcccctgagtat

SEQ ID NO: 413832 - DNA, 20 bp, Artificial Sequence
  Description of Artificial Sequence: Synthetic oligonucleotide
  Target: LAMA2; (+) strand; PAM type: YTN; PAM sequence: TTC
ccctgagtatttctctgata

SEQ ID NO: 413833 - DNA, 20 bp, Artificial Sequence
  Description of Artificial Sequence: Synthetic oligonucleotide
  Target: LAMA2; (+) strand; PAM type: YTN; PAM sequence: CTG
agtatttctctgatactcag

SEQ ID NO: 413834 - DNA, 20 bp, Artificial Sequence
  Description of Artificial Sequence: Synthetic oligonucleotide
  Target: LAMA2; (+) strand; PAM type: YTN; PAM sequence: TTT
ctctgatactcagttcagtt

SEQ ID NO: 413835 - DNA, 20 bp, Artificial Sequence
  Description of Artificial Sequence: Synthetic oligonucleotide
  Target: LAMA2; (+) strand; PAM type: YTN; PAM sequence: TTC
tctgatactcagttcagttg

SEQ ID NO: 413836 - DNA, 20 bp, Artificial Sequence
  Description of Artificial Sequence: Synthetic oligonucleotide
  Target: LAMA2; (+) strand; PAM type: YTN; PAM sequence: CTC
tgatactcagttcagttggt

SEQ ID NO: 413837 - DNA, 20 bp, Artificial Sequence
  Description of Artificial Sequence: Synthetic oligonucleotide
  Target: LAMA2; (+) strand; PAM type: YTN; PAM sequence: CTG
atactcagttcagttggtgt

SEQ ID NO: 413838 - DNA, 20 bp, Artificial Sequence
  Description of Artificial Sequence: Synthetic oligonucleotide
  Target: LAMA2; (+) strand; PAM type: YTN; PAM sequence: CTC
agttcagttggtgtggtcta

SEQ ID NO: 413839 - DNA, 20 bp, Artificial Sequence
  Description of Artificial Sequence: Synthetic oligonucleotide
  Target: LAMA2; (+) strand; PAM type: YTN; PAM sequence: TTC
agttggtgtggtctagacag

SEQ ID NO: 413840 - DNA, 20 bp, Artificial Sequence
  Description of Artificial Sequence: Synthetic oligonucleotide
  Target: LAMA2; (+) strand; PAM type: YTN; PAM sequence: TTG
gtgtggtctagacagatctt

SEQ ID NO: 413841 - DNA, 20 bp, Artificial Sequence
  Description of Artificial Sequence: Synthetic oligonucleotide
  Target: LAMA2; (+) strand; PAM type: YTN; PAM sequence: CTA
gacagatcttaacatatcac

SEQ ID NO: 413842 - DNA, 20 bp, Artificial Sequence
  Description of Artificial Sequence: Synthetic oligonucleotide
  Target: LAMA2; (+) strand; PAM type: YTN; PAM sequence: CTT
aacatatcactttgttccta

SEQ ID NO: 413843 - DNA, 20 bp, Artificial Sequence
  Description of Artificial Sequence: Synthetic oligonucleotide
  Target: LAMA2; (+) strand; PAM type: YTN; PAM sequence: TTA
acatatcactttgttcctaa

SEQ ID NO: 413844 - DNA, 20 bp, Artificial Sequence
  Description of Artificial Sequence: Synthetic oligonucleotide
  Target: LAMA2; (+) strand; PAM type: YTN; PAM sequence: CTT
tgttcctaagtgatgtatct

SEQ ID NO: 413845 - DNA, 20 bp, Artificial Sequence
  Description of Artificial Sequence: Synthetic oligonucleotide
  Target: LAMA2; (+) strand; PAM type: YTN; PAM sequence: TTT
gttcctaagtgatgtatcta

SEQ ID NO: 413846 - DNA, 20 bp, Artificial Sequence
  Description of Artificial Sequence: Synthetic oligonucleotide
  Target: LAMA2; (+) strand; PAM type: YTN; PAM sequence: TTG
ttcctaagtgatgtatctat

SEQ ID NO: 413847 - DNA, 20 bp, Artificial Sequence
  Description of Artificial Sequence: Synthetic oligonucleotide
  Target: LAMA2; (+) strand; PAM type: YTN; PAM sequence: TTC
ctaagtgatgtatctatctt

SEQ ID NO: 413848 - DNA, 20 bp, Artificial Sequence
  Description of Artificial Sequence: Synthetic oligonucleotide
  Target: LAMA2; (+) strand; PAM type: YTN; PAM sequence: CTA
agtgatgtatctatcttaaa

SEQ ID NO: 413849 - DNA, 20 bp, Artificial Sequence
  Description of Artificial Sequence: Synthetic oligonucleotide
  Target: LAMA2; (+) strand; PAM type: YTN; PAM sequence: CTA
tcttaaatacttgctcaaag

SEQ ID NO: 413850 - DNA, 20 bp, Artificial Sequence
  Description of Artificial Sequence: Synthetic oligonucleotide
  Target: LAMA2; (+) strand; PAM type: YTN; PAM sequence: CTT
aaatacttgctcaaagatta

SEQ ID NO: 413851 - DNA, 20 bp, Artificial Sequence
  Description of Artificial Sequence: Synthetic oligonucleotide
  Target: LAMA2; (+) strand; PAM type: YTN; PAM sequence: TTA
aatacttgctcaaagattaa

SEQ ID NO: 413852 - DNA, 20 bp, Artificial Sequence
  Description of Artificial Sequence: Synthetic oligonucleotide
  Target: LAMA2; (+) strand; PAM type: YTN; PAM sequence: CTT
gctcaaagattaaaaaaaaa

SEQ ID NO: 413853 - DNA, 20 bp, Artificial Sequence
  Description of Artificial Sequence: Synthetic oligonucleotide
  Target: LAMA2; (+) strand; PAM type: YTN; PAM sequence: TTG
ctcaaagattaaaaaaaaaa

SEQ ID NO: 413854 - DNA, 20 bp, Artificial Sequence
  Description of Artificial Sequence: Synthetic oligonucleotide
  Target: LAMA2; (+) strand; PAM type: YTN; PAM sequence: CTC
aaagattaaaaaaaaaatca

SEQ ID NO: 413855 - DNA, 20 bp, Artificial Sequence
  Description of Artificial Sequence: Synthetic oligonucleotide
  Target: LAMA2; (+) strand; PAM type: YTN; PAM sequence: TTA
aaaaaaaaatcaaagagtca

SEQ ID NO: 413856 - DNA, 20 bp, Artificial Sequence
  Description of Artificial Sequence: Synthetic oligonucleotide
  Target: LAMA2; (+) strand; PAM type: YTN; PAM sequence: TTA
actggatgaacaagataagt

SEQ ID NO: 413857 - DNA, 20 bp, Artificial Sequence
  Description of Artificial Sequence: Synthetic oligonucleotide
  Target: LAMA2; (+) strand; PAM type: YTN; PAM sequence: CTG
gatgaacaagataagtctat

SEQ ID NO: 413858 - DNA, 20 bp, Artificial Sequence
  Description of Artificial Sequence: Synthetic oligonucleotide
  Target: LAMA2; (+) strand; PAM type: YTN; PAM sequence: CTA
tttatgtcccagaagcttcc

SEQ ID NO: 413859 - DNA, 20 bp, Artificial Sequence
  Description of Artificial Sequence: Synthetic oligonucleotide
  Target: LAMA2; (+) strand; PAM type: YTN; PAM sequence: TTT
atgtcccagaagcttcccat

SEQ ID NO: 413860 - DNA, 20 bp, Artificial Sequence
  Description of Artificial Sequence: Synthetic oligonucleotide
  Target: LAMA2; (+) strand; PAM type: YTN; PAM sequence: TTA
tgtcccagaagcttcccatc

SEQ ID NO: 413861 - DNA, 20 bp, Artificial Sequence
  Description of Artificial Sequence: Synthetic oligonucleotide
  Target: LAMA2; (+) strand; PAM type: YTN; PAM sequence: CTT
cccatcaacattgtacttac

SEQ ID NO: 413862 - DNA, 20 bp, Artificial Sequence
  Description of Artificial Sequence: Synthetic oligonucleotide
  Target: LAMA2; (+) strand; PAM type: YTN; PAM sequence: TTC
ccatcaacattgtacttaca

SEQ ID NO: 413863 - DNA, 20 bp, Artificial Sequence
  Description of Artificial Sequence: Synthetic oligonucleotide
  Target: LAMA2; (+) strand; PAM type: YTN; PAM sequence: TTG
tacttacagtttctctcttt

SEQ ID NO: 413864 - DNA, 20 bp, Artificial Sequence
  Description of Artificial Sequence: Synthetic oligonucleotide
  Target: LAMA2; (+) strand; PAM type: YTN; PAM sequence: CTT
acagtttctctctttattaa

SEQ ID NO: 413865 - DNA, 20 bp, Artificial Sequence
  Description of Artificial Sequence: Synthetic oligonucleotide
  Target: LAMA2; (+) strand; PAM type: YTN; PAM sequence: TTA
cagtttctctctttattaat

SEQ ID NO: 413866 - DNA, 20 bp, Artificial Sequence
  Description of Artificial Sequence: Synthetic oligonucleotide
  Target: LAMA2; (+) strand; PAM type: YTN; PAM sequence: TTT
ctctctttattaataaaatg

SEQ ID NO: 413867 - DNA, 20 bp, Artificial Sequence
  Description of Artificial Sequence: Synthetic oligonucleotide
  Target: LAMA2; (+) strand; PAM type: YTN; PAM sequence: TTC
tctctttattaataaaatgt

SEQ ID NO: 413868 - DNA, 20 bp, Artificial Sequence
  Description of Artificial Sequence: Synthetic oligonucleotide
  Target: LAMA2; (+) strand; PAM type: YTN; PAM sequence: CTC
tctttattaataaaatgtgt

SEQ ID NO: 413869 - DNA, 20 bp, Artificial Sequence
  Description of Artificial Sequence: Synthetic oligonucleotide
  Target: LAMA2; (+) strand; PAM type: YTN; PAM sequence: CTC
tttattaataaaatgtgtgg

SEQ ID NO: 413870 - DNA, 20 bp, Artificial Sequence
  Description of Artificial Sequence: Synthetic oligonucleotide
  Target: LAMA2; (+) strand; PAM type: YTN; PAM sequence: CTT
tattaataaaatgtgtggca

SEQ ID NO: 413871 - DNA, 20 bp, Artificial Sequence
  Description of Artificial Sequence: Synthetic oligonucleotide
  Target: LAMA2; (+) strand; PAM type: YTN; PAM sequence: TTT
attaataaaatgtgtggcaa

SEQ ID NO: 413872 - DNA, 20 bp, Artificial Sequence
  Description of Artificial Sequence: Synthetic oligonucleotide
  Target: LAMA2; (+) strand; PAM type: YTN; PAM sequence: TTA
ttaataaaatgtgtggcaac

SEQ ID NO: 413873 - DNA, 20 bp, Artificial Sequence
  Description of Artificial Sequence: Synthetic oligonucleotide
  Target: LAMA2; (+) strand; PAM type: YTN; PAM sequence: TTA
ataaaatgtgtggcaacttt

SEQ ID NO: 413874 - DNA, 20 bp, Artificial Sequence
  Description of Artificial Sequence: Synthetic oligonucleotide
  Target: LAMA2; (+) strand; PAM type: YTN; PAM sequence: CTT
ttgaaacctttcagatgatt

SEQ ID NO: 413875 - DNA, 20 bp, Artificial Sequence
  Description of Artificial Sequence: Synthetic oligonucleotide
  Target: LAMA2; (+) strand; PAM type: YTN; PAM sequence: TTT
tgaaacctttcagatgattg

SEQ ID NO: 413876 - DNA, 20 bp, Artificial Sequence
  Description of Artificial Sequence: Synthetic oligonucleotide
  Target: LAMA2; (+) strand; PAM type: YTN; PAM sequence: TTT
gaaacctttcagatgattgt

SEQ ID NO: 413877 - DNA, 20 bp, Artificial Sequence
  Description of Artificial Sequence: Synthetic oligonucleotide
  Target: LAMA2; (+) strand; PAM type: YTN; PAM sequence: TTG
aaacctttcagatgattgtg

SEQ ID NO: 413878 - DNA, 20 bp, Artificial Sequence
  Description of Artificial Sequence: Synthetic oligonucleotide
  Target: LAMA2; (+) strand; PAM type: YTN; PAM sequence: CTT
tcagatgattgtggcaccat

SEQ ID NO: 413879 - DNA, 20 bp, Artificial Sequence
  Description of Artificial Sequence: Synthetic oligonucleotide
  Target: LAMA2; (+) strand; PAM type: YTN; PAM sequence: TTT
cagatgattgtggcaccatt

SEQ ID NO: 413880 - DNA, 20 bp, Artificial Sequence
  Description of Artificial Sequence: Synthetic oligonucleotide
  Target: LAMA2; (+) strand; PAM type: YTN; PAM sequence: TTC
agatgattgtggcaccattt

SEQ ID NO: 413881 - DNA, 20 bp, Artificial Sequence
  Description of Artificial Sequence: Synthetic oligonucleotide
  Target: LAMA2; (+) strand; PAM type: YTN; PAM sequence: TTG
tggcaccatttagtgtgccc

SEQ ID NO: 413882 - DNA, 20 bp, Artificial Sequence
  Description of Artificial Sequence: Synthetic oligonucleotide
  Target: LAMA2; (+) strand; PAM type: YTN; PAM sequence: TTT
agtgtgccccactaaaactt

SEQ ID NO: 413883 - DNA, 20 bp, Artificial Sequence
  Description of Artificial Sequence: Synthetic oligonucleotide
  Target: LAMA2; (+) strand; PAM type: YTN; PAM sequence: TTA
gtgtgccccactaaaacttt

SEQ ID NO: 413884 - DNA, 20 bp, Artificial Sequence
  Description of Artificial Sequence: Synthetic oligonucleotide
  Target: LAMA2; (+) strand; PAM type: YTN; PAM sequence: CTA
aaactttactgaaaaataac

SEQ ID NO: 413885 - DNA, 20 bp, Artificial Sequence
  Description of Artificial Sequence: Synthetic oligonucleotide
  Target: LAMA2; (+) strand; PAM type: YTN; PAM sequence: CTT
tactgaaaaataactgaaat

SEQ ID NO: 413886 - DNA, 20 bp, Artificial Sequence
  Description of Artificial Sequence: Synthetic oligonucleotide
  Target: LAMA2; (+) strand; PAM type: YTN; PAM sequence: TTT
actgaaaaataactgaaatg

SEQ ID NO: 413887 - DNA, 20 bp, Artificial Sequence
  Description of Artificial Sequence: Synthetic oligonucleotide
  Target: LAMA2; (+) strand; PAM type: YTN; PAM sequence: TTA
ctgaaaaataactgaaatgt

SEQ ID NO: 413888 - DNA, 20 bp, Artificial Sequence
  Description of Artificial Sequence: Synthetic oligonucleotide
  Target: LAMA2; (+) strand; PAM type: YTN; PAM sequence: CTG
aaaaataactgaaatgtttt

SEQ ID NO: 413889 - DNA, 20 bp, Artificial Sequence
  Description of Artificial Sequence: Synthetic oligonucleotide
  Target: LAMA2; (+) strand; PAM type: YTN; PAM sequence: CTG
aaatgtttttctttacccaa

SEQ ID NO: 413890 - DNA, 20 bp, Artificial Sequence
  Description of Artificial Sequence: Synthetic oligonucleotide
  Target: LAMA2; (+) strand; PAM type: YTN; PAM sequence: TTT
ttctttacccaacagagaga

SEQ ID NO: 413891 - DNA, 20 bp, Artificial Sequence
  Description of Artificial Sequence: Synthetic oligonucleotide
  Target: LAMA2; (+) strand; PAM type: YTN; PAM sequence: TTT
tctttacccaacagagagac

SEQ ID NO: 413892 - DNA, 20 bp, Artificial Sequence
  Description of Artificial Sequence: Synthetic oligonucleotide
  Target: LAMA2; (+) strand; PAM type: YTN; PAM sequence: TTT
ctttacccaacagagagact

SEQ ID NO: 413893 - DNA, 20 bp, Artificial Sequence
  Description of Artificial Sequence: Synthetic oligonucleotide
  Target: LAMA2; (+) strand; PAM type: YTN; PAM sequence: TTC
tttacccaacagagagactt

SEQ ID NO: 413894 - DNA, 20 bp, Artificial Sequence
  Description of Artificial Sequence: Synthetic oligonucleotide
  Target: LAMA2; (+) strand; PAM type: YTN; PAM sequence: CTT
tacccaacagagagacttct

SEQ ID NO: 413895 - DNA, 20 bp, Artificial Sequence
  Description of Artificial Sequence: Synthetic oligonucleotide
  Target: LAMA2; (+) strand; PAM type: YTN; PAM sequence: TTT
acccaacagagagacttcta

SEQ ID NO: 413896 - DNA, 20 bp, Artificial Sequence
  Description of Artificial Sequence: Synthetic oligonucleotide
  Target: LAMA2; (+) strand; PAM type: YTN; PAM sequence: TTA
cccaacagagagacttctaa

SEQ ID NO: 413897 - DNA, 20 bp, Artificial Sequence
  Description of Artificial Sequence: Synthetic oligonucleotide
  Target: LAMA2; (+) strand; PAM type: YTN; PAM sequence: CTT
ctaagataataatacctgac

SEQ ID NO: 413898 - DNA, 20 bp, Artificial Sequence
  Description of Artificial Sequence: Synthetic oligonucleotide
  Target: LAMA2; (+) strand; PAM type: YTN; PAM sequence: TTC
taagataataatacctgaca

SEQ ID NO: 413899 - DNA, 20 bp, Artificial Sequence
  Description of Artificial Sequence: Synthetic oligonucleotide
  Target: LAMA2; (+) strand; PAM type: YTN; PAM sequence: CTA
agataataatacctgacagt

SEQ ID NO: 413900 - DNA, 20 bp, Artificial Sequence
  Description of Artificial Sequence: Synthetic oligonucleotide
  Target: LAMA2; (+) strand; PAM type: YTN; PAM sequence: CTG
acagtgagattctttaagtc

SEQ ID NO: 413901 - DNA, 20 bp, Artificial Sequence
  Description of Artificial Sequence: Synthetic oligonucleotide
  Target: LAMA2; (+) strand; PAM type: YTN; PAM sequence: TTC
tttaagtcaatctcagtgtg

SEQ ID NO: 413902 - DNA, 20 bp, Artificial Sequence
  Description of Artificial Sequence: Synthetic oligonucleotide
  Target: LAMA2; (+) strand; PAM type: YTN; PAM sequence: CTT
taagtcaatctcagtgtgta

SEQ ID NO: 413903 - DNA, 20 bp, Artificial Sequence
  Description of Artificial Sequence: Synthetic oligonucleotide
  Target: LAMA2; (+) strand; PAM type: YTN; PAM sequence: TTT
aagtcaatctcagtgtgtat

SEQ ID NO: 413904 - DNA, 20 bp, Artificial Sequence
  Description of Artificial Sequence: Synthetic oligonucleotide
  Target: LAMA2; (+) strand; PAM type: YTN; PAM sequence: TTA
agtcaatctcagtgtgtatc

SEQ ID NO: 413905 - DNA, 20 bp, Artificial Sequence
  Description of Artificial Sequence: Synthetic oligonucleotide
  Target: LAMA2; (+) strand; PAM type: YTN; PAM sequence: CTC
agtgtgtatccatttattca

SEQ ID NO: 413906 - DNA, 20 bp, Artificial Sequence
  Description of Artificial Sequence: Synthetic oligonucleotide
  Target: LAMA2; (+) strand; PAM type: YTN; PAM sequence: TTT
attcaaataatacatagtaa

SEQ ID NO: 413907 - DNA, 20 bp, Artificial Sequence
  Description of Artificial Sequence: Synthetic oligonucleotide
  Target: LAMA2; (+) strand; PAM type: YTN; PAM sequence: TTA
ttcaaataatacatagtaaa

SEQ ID NO: 413908 - DNA, 20 bp, Artificial Sequence
  Description of Artificial Sequence: Synthetic oligonucleotide
  Target: LAMA2; (+) strand; PAM type: YTN; PAM sequence: TTC
aaataatacatagtaaaccc

SEQ ID NO: 413909 - DNA, 20 bp, Artificial Sequence
  Description of Artificial Sequence: Synthetic oligonucleotide
  Target: LAMA2; (+) strand; PAM type: YTN; PAM sequence: CTC
atgttgtgccagatactttg

SEQ ID NO: 413910 - DNA, 20 bp, Artificial Sequence
  Description of Artificial Sequence: Synthetic oligonucleotide
  Target: LAMA2; (+) strand; PAM type: YTN; PAM sequence: TTG
tgccagatactttggtaagc

SEQ ID NO: 413911 - DNA, 20 bp, Artificial Sequence
  Description of Artificial Sequence: Synthetic oligonucleotide
  Target: LAMA2; (+) strand; PAM type: YTN; PAM sequence: CTT
tggtaagcacagggataaaa

SEQ ID NO: 413912 - DNA, 20 bp, Artificial Sequence
  Description of Artificial Sequence: Synthetic oligonucleotide
  Target: LAMA2; (+) strand; PAM type: YTN; PAM sequence: TTT
ggtaagcacagggataaaat

SEQ ID NO: 413913 - DNA, 20 bp, Artificial Sequence
  Description of Artificial Sequence: Synthetic oligonucleotide
  Target: LAMA2; (+) strand; PAM type: YTN; PAM sequence: TTG
gtaagcacagggataaaatg

SEQ ID NO: 413914 - DNA, 20 bp, Artificial Sequence
  Description of Artificial Sequence: Synthetic oligonucleotide
  Target: LAMA2; (+) strand; PAM type: YTN; PAM sequence: CTG
atctcatagcacatacattc

SEQ ID NO: 413915 - DNA, 20 bp, Artificial Sequence
  Description of Artificial Sequence: Synthetic oligonucleotide
  Target: LAMA2; (+) strand; PAM type: YTN; PAM sequence: CTC
atagcacatacattctaaaa

SEQ ID NO: 413916 - DNA, 20 bp, Artificial Sequence
  Description of Artificial Sequence: Synthetic oligonucleotide
  Target: LAMA2; (+) strand; PAM type: YTN; PAM sequence: TTC
taaaagggaaggtagcccag

SEQ ID NO: 413917 - DNA, 20 bp, Artificial Sequence
  Description of Artificial Sequence: Synthetic oligonucleotide
  Target: LAMA2; (+) strand; PAM type: YTN; PAM sequence: CTA
aaagggaaggtagcccagaa

SEQ ID NO: 413918 - DNA, 20 bp, Artificial Sequence
  Description of Artificial Sequence: Synthetic oligonucleotide
  Target: LAMA2; (+) strand; PAM type: YTN; PAM sequence: CTA
actatggagtgtgttacatg

SEQ ID NO: 413919 - DNA, 20 bp, Artificial Sequence
  Description of Artificial Sequence: Synthetic oligonucleotide
  Target: LAMA2; (+) strand; PAM type: YTN; PAM sequence: CTA
tggagtgtgttacatgatgc

SEQ ID NO: 413920 - DNA, 20 bp, Artificial Sequence
  Description of Artificial Sequence: Synthetic oligonucleotide
  Target: LAMA2; (+) strand; PAM type: YTN; PAM sequence: TTA
catgatgcagtggtggaaga

SEQ ID NO: 413921 - DNA, 20 bp, Artificial Sequence
  Description of Artificial Sequence: Synthetic oligonucleotide
  Target: LAMA2; (+) strand; PAM type: YTN; PAM sequence: CTG
aaacttatagccctcattag

SEQ ID NO: 413922 - DNA, 20 bp, Artificial Sequence
  Description of Artificial Sequence: Synthetic oligonucleotide
  Target: LAMA2; (+) strand; PAM type: YTN; PAM sequence: CTT
atagccctcattagaattag

SEQ ID NO: 413923 - DNA, 20 bp, Artificial Sequence
  Description of Artificial Sequence: Synthetic oligonucleotide
  Target: LAMA2; (+) strand; PAM type: YTN; PAM sequence: TTA
tagccctcattagaattagc

SEQ ID NO: 413924 - DNA, 20 bp, Artificial Sequence
  Description of Artificial Sequence: Synthetic oligonucleotide
  Target: LAMA2; (+) strand; PAM type: YTN; PAM sequence: CTC
attagaattagctagcattt

SEQ ID NO: 413925 - DNA, 20 bp, Artificial Sequence
  Description of Artificial Sequence: Synthetic oligonucleotide
  Target: LAMA2; (+) strand; PAM type: YTN; PAM sequence: TTA
gaattagctagcatttgaat

SEQ ID NO: 413926 - DNA, 20 bp, Artificial Sequence
  Description of Artificial Sequence: Synthetic oligonucleotide
  Target: LAMA2; (+) strand; PAM type: YTN; PAM sequence: TTA
gctagcatttgaattgaaat

SEQ ID NO: 413927 - DNA, 20 bp, Artificial Sequence
  Description of Artificial Sequence: Synthetic oligonucleotide
  Target: LAMA2; (+) strand; PAM type: YTN; PAM sequence: CTA
gcatttgaattgaaatataa

SEQ ID NO: 413928 - DNA, 20 bp, Artificial Sequence
  Description of Artificial Sequence: Synthetic oligonucleotide
  Target: LAMA2; (+) strand; PAM type: YTN; PAM sequence: TTT
gaattgaaatataataaaaa

SEQ ID NO: 413929 - DNA, 20 bp, Artificial Sequence
  Description of Artificial Sequence: Synthetic oligonucleotide
  Target: LAMA2; (+) strand; PAM type: YTN; PAM sequence: TTG
aattgaaatataataaaaag

SEQ ID NO: 413930 - DNA, 20 bp, Artificial Sequence
  Description of Artificial Sequence: Synthetic oligonucleotide
  Target: LAMA2; (+) strand; PAM type: YTN; PAM sequence: TTG
aaatataataaaaagtcatg

SEQ ID NO: 413931 - DNA, 20 bp, Artificial Sequence
  Description of Artificial Sequence: Synthetic oligonucleotide
  Target: LAMA2; (+) strand; PAM type: YTN; PAM sequence: TTG
tacacgtttgaattaacaat

SEQ ID NO: 413932 - DNA, 20 bp, Artificial Sequence
  Description of Artificial Sequence: Synthetic oligonucleotide
  Target: LAMA2; (+) strand; PAM type: YTN; PAM sequence: TTT
gaattaacaatccccatcct

SEQ ID NO: 413933 - DNA, 20 bp, Artificial Sequence
  Description of Artificial Sequence: Synthetic oligonucleotide
  Target: LAMA2; (+) strand; PAM type: YTN; PAM sequence: TTG
aattaacaatccccatcctc

SEQ ID NO: 413934 - DNA, 20 bp, Artificial Sequence
  Description of Artificial Sequence: Synthetic oligonucleotide
  Target: LAMA2; (+) strand; PAM type: YTN; PAM sequence: TTA
acaatccccatcctctaatc

SEQ ID NO: 413935 - DNA, 20 bp, Artificial Sequence
  Description of Artificial Sequence: Synthetic oligonucleotide
  Target: LAMA2; (+) strand; PAM type: YTN; PAM sequence: CTC
taatccaaaatattttaaaa

SEQ ID NO: 413936 - DNA, 20 bp, Artificial Sequence
  Description of Artificial Sequence: Synthetic oligonucleotide
  Target: LAMA2; (+) strand; PAM type: YTN; PAM sequence: CTA
atccaaaatattttaaaatc

SEQ ID NO: 413937 - DNA, 20 bp, Artificial Sequence
  Description of Artificial Sequence: Synthetic oligonucleotide
  Target: LAMA2; (+) strand; PAM type: YTN; PAM sequence: TTT
taaaatcttcattttacagt

SEQ ID NO: 413938 - DNA, 20 bp, Artificial Sequence
  Description of Artificial Sequence: Synthetic oligonucleotide
  Target: LAMA2; (+) strand; PAM type: YTN; PAM sequence: TTT
aaaatcttcattttacagtt

SEQ ID NO: 413939 - DNA, 20 bp, Artificial Sequence
  Description of Artificial Sequence: Synthetic oligonucleotide
  Target: LAMA2; (+) strand; PAM type: YTN; PAM sequence: TTA
aaatcttcattttacagttg

SEQ ID NO: 413940 - DNA, 20 bp, Artificial Sequence
  Description of Artificial Sequence: Synthetic oligonucleotide
  Target: LAMA2; (+) strand; PAM type: YTN; PAM sequence: CTT
cattttacagttggtggatt

SEQ ID NO: 413941 - DNA, 20 bp, Artificial Sequence
  Description of Artificial Sequence: Synthetic oligonucleotide
  Target: LAMA2; (+) strand; PAM type: YTN; PAM sequence: TTC
attttacagttggtggattc

SEQ ID NO: 413942 - DNA, 20 bp, Artificial Sequence
  Description of Artificial Sequence: Synthetic oligonucleotide
  Target: LAMA2; (+) strand; PAM type: YTN; PAM sequence: TTT
tacagttggtggattcaaag

SEQ ID NO: 413943 - DNA, 20 bp, Artificial Sequence
  Description of Artificial Sequence: Synthetic oligonucleotide
  Target: LAMA2; (+) strand; PAM type: YTN; PAM sequence: TTT
acagttggtggattcaaagt

SEQ ID NO: 413944 - DNA, 20 bp, Artificial Sequence
  Description of Artificial Sequence: Synthetic oligonucleotide
  Target: LAMA2; (+) strand; PAM type: YTN; PAM sequence: TTA
cagttggtggattcaaagtg

SEQ ID NO: 413945 - DNA, 20 bp, Artificial Sequence
  Description of Artificial Sequence: Synthetic oligonucleotide
  Target: LAMA2; (+) strand; PAM type: YTN; PAM sequence: TTG
gtggattcaaagtgggattg

SEQ ID NO: 413946 - DNA, 20 bp, Artificial Sequence
  Description of Artificial Sequence: Synthetic oligonucleotide
  Target: LAMA2; (+) strand; PAM type: YTN; PAM sequence: TTC
aaagtgggattggaccttct

SEQ ID NO: 413947 - DNA, 20 bp, Artificial Sequence
  Description of Artificial Sequence: Synthetic oligonucleotide
  Target: LAMA2; (+) strand; PAM type: YTN; PAM sequence: TTG
gaccttcttgtagaatttga

SEQ ID NO: 413948 - DNA, 20 bp, Artificial Sequence
  Description of Artificial Sequence: Synthetic oligonucleotide
  Target: LAMA2; (+) strand; PAM type: YTN; PAM sequence: CTT
cttgtagaatttgaattccg

SEQ ID NO: 413949 - DNA, 20 bp, Artificial Sequence
  Description of Artificial Sequence: Synthetic oligonucleotide
  Target: LAMA2; (+) strand; PAM type: YTN; PAM sequence: TTC
ttgtagaatttgaattccgc

SEQ ID NO: 413950 - DNA, 20 bp, Artificial Sequence
  Description of Artificial Sequence: Synthetic oligonucleotide
  Target: LAMA2; (+) strand; PAM type: YTN; PAM sequence: CTT
gtagaatttgaattccgcac

SEQ ID NO: 413951 - DNA, 20 bp, Artificial Sequence
  Description of Artificial Sequence: Synthetic oligonucleotide
  Target: LAMA2; (+) strand; PAM type: YTN; PAM sequence: TTG
tagaatttgaattccgcaca

SEQ ID NO: 413952 - DNA, 20 bp, Artificial Sequence
  Description of Artificial Sequence: Synthetic oligonucleotide
  Target: LAMA2; (+) strand; PAM type: YTN; PAM sequence: TTT
gaattccgcacaactacaac

SEQ ID NO: 413953 - DNA, 20 bp, Artificial Sequence
  Description of Artificial Sequence: Synthetic oligonucleotide
  Target: LAMA2; (+) strand; PAM type: YTN; PAM sequence: TTG
aattccgcacaactacaacg

SEQ ID NO: 413954 - DNA, 20 bp, Artificial Sequence
  Description of Artificial Sequence: Synthetic oligonucleotide
  Target: LAMA2; (+) strand; PAM type: YTN; PAM sequence: TTC
cgcacaactacaacgactgg

SEQ ID NO: 413955 - DNA, 20 bp, Artificial Sequence
  Description of Artificial Sequence: Synthetic oligonucleotide
  Target: LAMA2; (+) strand; PAM type: YTN; PAM sequence: CTA
caacgactggagttcttctg

SEQ ID NO: 413956 - DNA, 20 bp, Artificial Sequence
  Description of Artificial Sequence: Synthetic oligonucleotide
  Target: LAMA2; (+) strand; PAM type: YTN; PAM sequence: CTG
gagttcttctggggatcagt

SEQ ID NO: 413957 - DNA, 20 bp, Artificial Sequence
  Description of Artificial Sequence: Synthetic oligonucleotide
  Target: LAMA2; (+) strand; PAM type: YTN; PAM sequence: TTC
ttctggggatcagtagtcaa

SEQ ID NO: 413958 - DNA, 20 bp, Artificial Sequence
  Description of Artificial Sequence: Synthetic oligonucleotide
  Target: LAMA2; (+) strand; PAM type: YTN; PAM sequence: CTT
ctggggatcagtagtcaaaa

SEQ ID NO: 413959 - DNA, 20 bp, Artificial Sequence
  Description of Artificial Sequence: Synthetic oligonucleotide
  Target: LAMA2; (+) strand; PAM type: YTN; PAM sequence: TTC
tggggatcagtagtcaaaaa

SEQ ID NO: 413960 - DNA, 20 bp, Artificial Sequence
  Description of Artificial Sequence: Synthetic oligonucleotide
  Target: LAMA2; (+) strand; PAM type: YTN; PAM sequence: CTG
gggatcagtagtcaaaaaat

SEQ ID NO: 413961 - DNA, 20 bp, Artificial Sequence
  Description of Artificial Sequence: Synthetic oligonucleotide
  Target: LAMA2; (+) strand; PAM type: YTN; PAM sequence: TTG
aaatgattgatgaaaaggtg

SEQ ID NO: 413962 - DNA, 20 bp, Artificial Sequence
  Description of Artificial Sequence: Synthetic oligonucleotide
  Target: LAMA2; (+) strand; PAM type: YTN; PAM sequence: TTG
atgaaaaggtgagtgtcagc

SEQ ID NO: 413963 - DNA, 20 bp, Artificial Sequence
  Description of Artificial Sequence: Synthetic oligonucleotide
  Target: LAMA2; (+) strand; PAM type: YTN; PAM sequence: TTT
ctgatttcttcatgatattg

SEQ ID NO: 413964 - DNA, 20 bp, Artificial Sequence
  Description of Artificial Sequence: Synthetic oligonucleotide
  Target: LAMA2; (+) strand; PAM type: YTN; PAM sequence: TTC
tgatttcttcatgatattgt

SEQ ID NO: 413965 - DNA, 20 bp, Artificial Sequence
  Description of Artificial Sequence: Synthetic oligonucleotide
  Target: LAMA2; (+) strand; PAM type: YTN; PAM sequence: CTG
atttcttcatgatattgttg

SEQ ID NO: 413966 - DNA, 20 bp, Artificial Sequence
  Description of Artificial Sequence: Synthetic oligonucleotide
  Target: LAMA2; (+) strand; PAM type: YTN; PAM sequence: TTT
cttcatgatattgttgatgt

SEQ ID NO: 413967 - DNA, 20 bp, Artificial Sequence
  Description of Artificial Sequence: Synthetic oligonucleotide
  Target: LAMA2; (+) strand; PAM type: YTN; PAM sequence: TTC
ttcatgatattgttgatgtg

SEQ ID NO: 413968 - DNA, 20 bp, Artificial Sequence
  Description of Artificial Sequence: Synthetic oligonucleotide
  Target: LAMA2; (+) strand; PAM type: YTN; PAM sequence: CTT
catgatattgttgatgtgta

SEQ ID NO: 413969 - DNA, 20 bp, Artificial Sequence
  Description of Artificial Sequence: Synthetic oligonucleotide
  Target: LAMA2; (+) strand; PAM type: YTN; PAM sequence: TTC
atgatattgttgatgtgtag

SEQ ID NO: 413970 - DNA, 20 bp, Artificial Sequence
  Description of Artificial Sequence: Synthetic oligonucleotide
  Target: LAMA2; (+) strand; PAM type: YTN; PAM sequence: TTG
ttgatgtgtagatatcatcc

SEQ ID NO: 413971 - DNA, 20 bp, Artificial Sequence
  Description of Artificial Sequence: Synthetic oligonucleotide
  Target: LAMA2; (+) strand; PAM type: YTN; PAM sequence: TTG
atgtgtagatatcatccatg

SEQ ID NO: 413972 - DNA, 20 bp, Artificial Sequence
  Description of Artificial Sequence: Synthetic oligonucleotide
  Target: LAMA2; (+) strand; PAM type: YTN; PAM sequence: CTC
gaatattttgaagcccggct

SEQ ID NO: 413973 - DNA, 20 bp, Artificial Sequence
  Description of Artificial Sequence: Synthetic oligonucleotide
  Target: LAMA2; (+) strand; PAM type: YTN; PAM sequence: TTT
tgaagcccggctgtattctt

SEQ ID NO: 413974 - DNA, 20 bp, Artificial Sequence
  Description of Artificial Sequence: Synthetic oligonucleotide
  Target: LAMA2; (+) strand; PAM type: YTN; PAM sequence: TTT
gaagcccggctgtattcttt

SEQ ID NO: 413975 - DNA, 20 bp, Artificial Sequence
  Description of Artificial Sequence: Synthetic oligonucleotide
  Target: LAMA2; (+) strand; PAM type: YTN; PAM sequence: TTG
aagcccggctgtattctttg

SEQ ID NO: 413976 - DNA, 20 bp, Artificial Sequence
  Description of Artificial Sequence: Synthetic oligonucleotide
  Target: LAMA2; (+) strand; PAM type: YTN; PAM sequence: CTG
tattctttgttgggagaaag

SEQ ID NO: 413977 - DNA, 20 bp, Artificial Sequence
  Description of Artificial Sequence: Synthetic oligonucleotide
  Target: LAMA2; (+) strand; PAM type: YTN; PAM sequence: TTC
tttgttgggagaaagctaaa

SEQ ID NO: 413978 - DNA, 20 bp, Artificial Sequence
  Description of Artificial Sequence: Synthetic oligonucleotide
  Target: LAMA2; (+) strand; PAM type: YTN; PAM sequence: CTT
tgttgggagaaagctaaatt

SEQ ID NO: 413979 - DNA, 20 bp, Artificial Sequence
  Description of Artificial Sequence: Synthetic oligonucleotide
  Target: LAMA2; (+) strand; PAM type: YTN; PAM sequence: TTT
gttgggagaaagctaaattg

SEQ ID NO: 413980 - DNA, 20 bp, Artificial Sequence
  Description of Artificial Sequence: Synthetic oligonucleotide
  Target: LAMA2; (+) strand; PAM type: YTN; PAM sequence: TTG
ttgggagaaagctaaattgt

SEQ ID NO: 413981 - DNA, 20 bp, Artificial Sequence
  Description of Artificial Sequence: Synthetic oligonucleotide
  Target: LAMA2; (+) strand; PAM type: YTN; PAM sequence: TTG
ggagaaagctaaattgtatg

SEQ ID NO: 413982 - DNA, 20 bp, Artificial Sequence
  Description of Artificial Sequence: Synthetic oligonucleotide
  Target: LAMA2; (+) strand; PAM type: YTN; PAM sequence: CTA
aattgtatgttttcatcctt

SEQ ID NO: 413983 - DNA, 20 bp, Artificial Sequence
  Description of Artificial Sequence: Synthetic oligonucleotide
  Target: LAMA2; (+) strand; PAM type: YTN; PAM sequence: TTG
tatgttttcatccttctgga

SEQ ID NO: 413984 - DNA, 20 bp, Artificial Sequence
  Description of Artificial Sequence: Synthetic oligonucleotide
  Target: LAMA2; (+) strand; PAM type: YTN; PAM sequence: TTT
tcatccttctggattacttc

SEQ ID NO: 413985 - DNA, 20 bp, Artificial Sequence
  Description of Artificial Sequence: Synthetic oligonucleotide
  Target: LAMA2; (+) strand; PAM type: YTN; PAM sequence: TTT
catccttctggattacttca

SEQ ID NO: 413986 - DNA, 20 bp, Artificial Sequence
  Description of Artificial Sequence: Synthetic oligonucleotide
  Target: LAMA2; (+) strand; PAM type: YTN; PAM sequence: TTC
atccttctggattacttcaa

SEQ ID NO: 413987 - DNA, 20 bp, Artificial Sequence
  Description of Artificial Sequence: Synthetic oligonucleotide
  Target: LAMA2; (+) strand; PAM type: YTN; PAM sequence: CTT
ctggattacttcaatttgtg

SEQ ID NO: 413988 - DNA, 20 bp, Artificial Sequence
  Description of Artificial Sequence: Synthetic oligonucleotide
  Target: LAMA2; (+) strand; PAM type: YTN; PAM sequence: TTC
tggattacttcaatttgtgt

SEQ ID NO: 413989 - DNA, 20 bp, Artificial Sequence
  Description of Artificial Sequence: Synthetic oligonucleotide
  Target: LAMA2; (+) strand; PAM type: YTN; PAM sequence: CTG
gattacttcaatttgtgtat

SEQ ID NO: 413990 - DNA, 20 bp, Artificial Sequence
  Description of Artificial Sequence: Synthetic oligonucleotide
  Target: LAMA2; (+) strand; PAM type: YTN; PAM sequence: TTA
cttcaatttgtgtatgtttt

SEQ ID NO: 413991 - DNA, 20 bp, Artificial Sequence
  Description of Artificial Sequence: Synthetic oligonucleotide
  Target: LAMA2; (+) strand; PAM type: YTN; PAM sequence: CTT
caatttgtgtatgttttcag

SEQ ID NO: 413992 - DNA, 20 bp, Artificial Sequence
  Description of Artificial Sequence: Synthetic oligonucleotide
  Target: LAMA2; (+) strand; PAM type: YTN; PAM sequence: TTC
aatttgtgtatgttttcagc

SEQ ID NO: 413993 - DNA, 20 bp, Artificial Sequence
  Description of Artificial Sequence: Synthetic oligonucleotide
  Target: LAMA2; (+) strand; PAM type: YTN; PAM sequence: TTT
gtgtatgttttcagcatgtt

SEQ ID NO: 413994 - DNA, 20 bp, Artificial Sequence
  Description of Artificial Sequence: Synthetic oligonucleotide
  Target: LAMA2; (+) strand; PAM type: YTN; PAM sequence: TTG
tgtatgttttcagcatgttg

SEQ ID NO: 413995 - DNA, 20 bp, Artificial Sequence
  Description of Artificial Sequence: Synthetic oligonucleotide
  Target: LAMA2; (+) strand; PAM type: YTN; PAM sequence: TTT
tcagcatgttgtaggccagt

SEQ ID NO: 413996 - DNA, 20 bp, Artificial Sequence
  Description of Artificial Sequence: Synthetic oligonucleotide
  Target: LAMA2; (+) strand; PAM type: YTN; PAM sequence: TTT
cagcatgttgtaggccagta

SEQ ID NO: 413997 - DNA, 20 bp, Artificial Sequence
  Description of Artificial Sequence: Synthetic oligonucleotide
  Target: LAMA2; (+) strand; PAM type: YTN; PAM sequence: TTC
agcatgttgtaggccagtat

SEQ ID NO: 413998 - DNA, 20 bp, Artificial Sequence
  Description of Artificial Sequence: Synthetic oligonucleotide
  Target: LAMA2; (+) strand; PAM type: YTN; PAM sequence: TTG
taggccagtataaattttaa

SEQ ID NO: 413999 - DNA, 20 bp, Artificial Sequence
  Description of Artificial Sequence: Synthetic oligonucleotide
  Target: LAMA2; (+) strand; PAM type: YTN; PAM sequence: TTT
taaatgcattaattgtacag

SEQ ID NO: 414000 - DNA, 20 bp, Artificial Sequence
  Description of Artificial Sequence: Synthetic oligonucleotide
  Target: LAMA2; (+) strand; PAM type: YTN; PAM sequence: TTT
aaatgcattaattgtacagc

SEQ ID NO: 414001 - DNA, 20 bp, Artificial Sequence
  Description of Artificial Sequence: Synthetic oligonucleotide
  Target: LAMA2; (+) strand; PAM type: YTN; PAM sequence: TTA
aatgcattaattgtacagca

SEQ ID NO: 414002 - DNA, 20 bp, Artificial Sequence
  Description of Artificial Sequence: Synthetic oligonucleotide
  Target: LAMA2; (+) strand; PAM type: YTN; PAM sequence: TTA
attgtacagcaagccaatcg

SEQ ID NO: 414003 - DNA, 20 bp, Artificial Sequence
  Description of Artificial Sequence: Synthetic oligonucleotide
  Target: LAMA2; (+) strand; PAM type: YTN; PAM sequence: TTG
tacagcaagccaatcgtgtt

SEQ ID NO: 414004 - DNA, 20 bp, Artificial Sequence
  Description of Artificial Sequence: Synthetic oligonucleotide
  Target: LAMA2; (+) strand; PAM type: YTN; PAM sequence: TTG
actaataatgaaccaaatag

SEQ ID NO: 414005 - DNA, 20 bp, Artificial Sequence
  Description of Artificial Sequence: Synthetic oligonucleotide
  Target: LAMA2; (+) strand; PAM type: YTN; PAM sequence: CTA
ataatgaaccaaatagtttg

SEQ ID NO: 414006 - DNA, 20 bp, Artificial Sequence
  Description of Artificial Sequence: Synthetic oligonucleotide
  Target: LAMA2; (+) strand; PAM type: YTN; PAM sequence: TTT
gagatctcgagttcttactg

SEQ ID NO: 414007 - DNA, 20 bp, Artificial Sequence
  Description of Artificial Sequence: Synthetic oligonucleotide
  Target: LAMA2; (+) strand; PAM type: YTN; PAM sequence: TTG
agatctcgagttcttactgt

SEQ ID NO: 414008 - DNA, 20 bp, Artificial Sequence
  Description of Artificial Sequence: Synthetic oligonucleotide
  Target: LAMA2; (+) strand; PAM type: YTN; PAM sequence: CTC
gagttcttactgtgttgcta

SEQ ID NO: 414009 - DNA, 20 bp, Artificial Sequence
  Description of Artificial Sequence: Synthetic oligonucleotide
  Target: LAMA2; (+) strand; PAM type: YTN; PAM sequence: TTC
ttactgtgttgctataaaca

SEQ ID NO: 414010 - DNA, 20 bp, Artificial Sequence
  Description of Artificial Sequence: Synthetic oligonucleotide
  Target: LAMA2; (+) strand; PAM type: YTN; PAM sequence: CTT
actgtgttgctataaacaca

SEQ ID NO: 414011 - DNA, 20 bp, Artificial Sequence
  Description of Artificial Sequence: Synthetic oligonucleotide
  Target: LAMA2; (+) strand; PAM type: YTN; PAM sequence: TTA
ctgtgttgctataaacacac

SEQ ID NO: 414012 - DNA, 20 bp, Artificial Sequence
  Description of Artificial Sequence: Synthetic oligonucleotide
  Target: LAMA2; (+) strand; PAM type: YTN; PAM sequence: CTG
tgttgctataaacacactct

SEQ ID NO: 414013 - DNA, 20 bp, Artificial Sequence
  Description of Artificial Sequence: Synthetic oligonucleotide
  Target: LAMA2; (+) strand; PAM type: YTN; PAM sequence: TTG
ctataaacacactcttattc

SEQ ID NO: 414014 - DNA, 20 bp, Artificial Sequence
  Description of Artificial Sequence: Synthetic oligonucleotide
  Target: LAMA2; (+) strand; PAM type: YTN; PAM sequence: CTA
taaacacactcttattctcc

SEQ ID NO: 414015 - DNA, 20 bp, Artificial Sequence
  Description of Artificial Sequence: Synthetic oligonucleotide
  Target: LAMA2; (+) strand; PAM type: YTN; PAM sequence: CTC
ttattctcctcttaaggaac

SEQ ID NO: 414016 - DNA, 20 bp, Artificial Sequence
  Description of Artificial Sequence: Synthetic oligonucleotide
  Target: LAMA2; (+) strand; PAM type: YTN; PAM sequence: CTT
attctcctcttaaggaacac

SEQ ID NO: 414017 - DNA, 20 bp, Artificial Sequence
  Description of Artificial Sequence: Synthetic oligonucleotide
  Target: LAMA2; (+) strand; PAM type: YTN; PAM sequence: TTA
ttctcctcttaaggaacaca

SEQ ID NO: 414018 - DNA, 20 bp, Artificial Sequence
  Description of Artificial Sequence: Synthetic oligonucleotide
  Target: LAMA2; (+) strand; PAM type: YTN; PAM sequence: TTC
tcctcttaaggaacacacag

SEQ ID NO: 414019 - DNA, 20 bp, Artificial Sequence
  Description of Artificial Sequence: Synthetic oligonucleotide
  Target: LAMA2; (+) strand; PAM type: YTN; PAM sequence: CTC
ctcttaaggaacacacagtc

SEQ ID NO: 414020 - DNA, 20 bp, Artificial Sequence
  Description of Artificial Sequence: Synthetic oligonucleotide
  Target: LAMA2; (+) strand; PAM type: YTN; PAM sequence: CTC
ttaaggaacacacagtctat

SEQ ID NO: 414021 - DNA, 20 bp, Artificial Sequence
  Description of Artificial Sequence: Synthetic oligonucleotide
  Target: LAMA2; (+) strand; PAM type: YTN; PAM sequence: CTT
aaggaacacacagtctatga

SEQ ID NO: 414022 - DNA, 20 bp, Artificial Sequence
  Description of Artificial Sequence: Synthetic oligonucleotide
  Target: LAMA2; (+) strand; PAM type: YTN; PAM sequence: TTA
aggaacacacagtctatgag

SEQ ID NO: 414023 - DNA, 20 bp, Artificial Sequence
  Description of Artificial Sequence: Synthetic oligonucleotide
  Target: LAMA2; (+) strand; PAM type: YTN; PAM sequence: CTA
tgagactatggactccagtg

SEQ ID NO: 414024 - DNA, 20 bp, Artificial Sequence
  Description of Artificial Sequence: Synthetic oligonucleotide
  Target: LAMA2; (+) strand; PAM type: YTN; PAM sequence: CTA
tggactccagtgggagaaaa

SEQ ID NO: 414025 - DNA, 20 bp, Artificial Sequence
  Description of Artificial Sequence: Synthetic oligonucleotide
  Target: LAMA2; (+) strand; PAM type: YTN; PAM sequence: CTC
cagtgggagaaaaggcagag

SEQ ID NO: 414026 - DNA, 20 bp, Artificial Sequence
  Description of Artificial Sequence: Synthetic oligonucleotide
  Target: LAMA2; (+) strand; PAM type: YTN; PAM sequence: CTA
aaattagtctgcctctttta

SEQ ID NO: 414027 - DNA, 20 bp, Artificial Sequence
  Description of Artificial Sequence: Synthetic oligonucleotide
  Target: LAMA2; (+) strand; PAM type: YTN; PAM sequence: TTA
gtctgcctcttttaacaggc

SEQ ID NO: 414028 - DNA, 20 bp, Artificial Sequence
  Description of Artificial Sequence: Synthetic oligonucleotide
  Target: LAMA2; (+) strand; PAM type: YTN; PAM sequence: CTG
cctcttttaacaggctaggc

SEQ ID NO: 414029 - DNA, 20 bp, Artificial Sequence
  Description of Artificial Sequence: Synthetic oligonucleotide
  Target: LAMA2; (+) strand; PAM type: YTN; PAM sequence: CTC
ttttaacaggctaggcatct

SEQ ID NO: 414030 - DNA, 20 bp, Artificial Sequence
  Description of Artificial Sequence: Synthetic oligonucleotide
  Target: LAMA2; (+) strand; PAM type: YTN; PAM sequence: CTT
ttaacaggctaggcatctct

SEQ ID NO: 414031 - DNA, 20 bp, Artificial Sequence
  Description of Artificial Sequence: Synthetic oligonucleotide
  Target: LAMA2; (+) strand; PAM type: YTN; PAM sequence: TTT
taacaggctaggcatctctt

SEQ ID NO: 414032 - DNA, 20 bp, Artificial Sequence
  Description of Artificial Sequence: Synthetic oligonucleotide
  Target: LAMA2; (+) strand; PAM type: YTN; PAM sequence: TTT
aacaggctaggcatctctta

SEQ ID NO: 414033 - DNA, 20 bp, Artificial Sequence
  Description of Artificial Sequence: Synthetic oligonucleotide
  Target: LAMA2; (+) strand; PAM type: YTN; PAM sequence: TTA
acaggctaggcatctcttag

SEQ ID NO: 414034 - DNA, 20 bp, Artificial Sequence
  Description of Artificial Sequence: Synthetic oligonucleotide
  Target: LAMA2; (+) strand; PAM type: YTN; PAM sequence: CTA
ggcatctcttagaagccaag

SEQ ID NO: 414035 - DNA, 20 bp, Artificial Sequence
  Description of Artificial Sequence: Synthetic oligonucleotide
  Target: LAMA2; (+) strand; PAM type: YTN; PAM sequence: CTC
ttagaagccaaggtagccaa

SEQ ID NO: 414036 - DNA, 20 bp, Artificial Sequence
  Description of Artificial Sequence: Synthetic oligonucleotide
  Target: LAMA2; (+) strand; PAM type: YTN; PAM sequence: CTT
agaagccaaggtagccaact

SEQ ID NO: 414037 - DNA, 20 bp, Artificial Sequence
  Description of Artificial Sequence: Synthetic oligonucleotide
  Target: LAMA2; (+) strand; PAM type: YTN; PAM sequence: TTA
gaagccaaggtagccaactg

SEQ ID NO: 414038 - DNA, 20 bp, Artificial Sequence
  Description of Artificial Sequence: Synthetic oligonucleotide
  Target: LAMA2; (+) strand; PAM type: YTN; PAM sequence: CTG
acgcatcagtttctcaattt

SEQ ID NO: 414039 - DNA, 20 bp, Artificial Sequence
  Description of Artificial Sequence: Synthetic oligonucleotide
  Target: LAMA2; (+) strand; PAM type: YTN; PAM sequence: TTT
ctcaatttgtttaaaaaagc

SEQ ID NO: 414040 - DNA, 20 bp, Artificial Sequence
  Description of Artificial Sequence: Synthetic oligonucleotide
  Target: LAMA2; (+) strand; PAM type: YTN; PAM sequence: TTC
tcaatttgtttaaaaaagca

SEQ ID NO: 414041 - DNA, 20 bp, Artificial Sequence
  Description of Artificial Sequence: Synthetic oligonucleotide
  Target: LAMA2; (+) strand; PAM type: YTN; PAM sequence: CTC
aatttgtttaaaaaagcatc

SEQ ID NO: 414042 - DNA, 20 bp, Artificial Sequence
  Description of Artificial Sequence: Synthetic oligonucleotide
  Target: LAMA2; (+) strand; PAM type: YTN; PAM sequence: TTT
gtttaaaaaagcatccagct

SEQ ID NO: 414043 - DNA, 20 bp, Artificial Sequence
  Description of Artificial Sequence: Synthetic oligonucleotide
  Target: LAMA2; (+) strand; PAM type: YTN; PAM sequence: TTG
tttaaaaaagcatccagcta

SEQ ID NO: 414044 - DNA, 20 bp, Artificial Sequence
  Description of Artificial Sequence: Synthetic oligonucleotide
  Target: LAMA2; (+) strand; PAM type: YTN; PAM sequence: TTT
aaaaaagcatccagctacca

SEQ ID NO: 414045 - DNA, 20 bp, Artificial Sequence
  Description of Artificial Sequence: Synthetic oligonucleotide
  Target: LAMA2; (+) strand; PAM type: YTN; PAM sequence: TTA
aaaaagcatccagctaccat

SEQ ID NO: 414046 - DNA, 20 bp, Artificial Sequence
  Description of Artificial Sequence: Synthetic oligonucleotide
  Target: LAMA2; (+) strand; PAM type: YTN; PAM sequence: CTA
ccatttcaaaaaacagcaaa

SEQ ID NO: 414047 - DNA, 20 bp, Artificial Sequence
  Description of Artificial Sequence: Synthetic oligonucleotide
  Target: LAMA2; (+) strand; PAM type: YTN; PAM sequence: TTT
caaaaaacagcaaatttata

SEQ ID NO: 414048 - DNA, 20 bp, Artificial Sequence
  Description of Artificial Sequence: Synthetic oligonucleotide
  Target: LAMA2; (+) strand; PAM type: YTN; PAM sequence: TTC
aaaaaacagcaaatttataa

SEQ ID NO: 414049 - DNA, 20 bp, Artificial Sequence
  Description of Artificial Sequence: Synthetic oligonucleotide
  Target: LAMA2; (+) strand; PAM type: YTN; PAM sequence: TTT
ataaaagtagtgtgtcagtt

SEQ ID NO: 414050 - DNA, 20 bp, Artificial Sequence
  Description of Artificial Sequence: Synthetic oligonucleotide
  Target: LAMA2; (+) strand; PAM type: YTN; PAM sequence: TTA
taaaagtagtgtgtcagttt

SEQ ID NO: 414051 - DNA, 20 bp, Artificial Sequence
  Description of Artificial Sequence: Synthetic oligonucleotide
  Target: LAMA2; (+) strand; PAM type: YTN; PAM sequence: TTT
gataataattgataatcaaa

SEQ ID NO: 414052 - DNA, 20 bp, Artificial Sequence
  Description of Artificial Sequence: Synthetic oligonucleotide
  Target: LAMA2; (+) strand; PAM type: YTN; PAM sequence: TTG
ataataattgataatcaaat

SEQ ID NO: 414053 - DNA, 20 bp, Artificial Sequence
  Description of Artificial Sequence: Synthetic oligonucleotide
  Target: LAMA2; (+) strand; PAM type: YTN; PAM sequence: TTG
ataatcaaattctaaacacc

SEQ ID NO: 414054 - DNA, 20 bp, Artificial Sequence
  Description of Artificial Sequence: Synthetic oligonucleotide
  Target: LAMA2; (+) strand; PAM type: YTN; PAM sequence: TTC
taaacacctctttcagccct

SEQ ID NO: 414055 - DNA, 20 bp, Artificial Sequence
  Description of Artificial Sequence: Synthetic oligonucleotide
  Target: LAMA2; (+) strand; PAM type: YTN; PAM sequence: CTA
aacacctctttcagccctgc

SEQ ID NO: 414056 - DNA, 20 bp, Artificial Sequence
  Description of Artificial Sequence: Synthetic oligonucleotide
  Target: LAMA2; (+) strand; PAM type: YTN; PAM sequence: CTC
tttcagccctgcattaagac

SEQ ID NO: 414057 - DNA, 20 bp, Artificial Sequence
  Description of Artificial Sequence: Synthetic oligonucleotide
  Target: LAMA2; (+) strand; PAM type: YTN; PAM sequence: CTT
tcagccctgcattaagacaa

SEQ ID NO: 414058 - DNA, 20 bp, Artificial Sequence
  Description of Artificial Sequence: Synthetic oligonucleotide
  Target: LAMA2; (+) strand; PAM type: YTN; PAM sequence: TTT
cagccctgcattaagacaac

SEQ ID NO: 414059 - DNA, 20 bp, Artificial Sequence
  Description of Artificial Sequence: Synthetic oligonucleotide
  Target: LAMA2; (+) strand; PAM type: YTN; PAM sequence: TTC
agccctgcattaagacaact

SEQ ID NO: 414060 - DNA, 20 bp, Artificial Sequence
  Description of Artificial Sequence: Synthetic oligonucleotide
  Target: LAMA2; (+) strand; PAM type: YTN; PAM sequence: CTG
cattaagacaactttgcact

SEQ ID NO: 414061 - DNA, 20 bp, Artificial Sequence
  Description of Artificial Sequence: Synthetic oligonucleotide
  Target: LAMA2; (+) strand; PAM type: YTN; PAM sequence: TTA
agacaactttgcactatagg

SEQ ID NO: 414062 - DNA, 20 bp, Artificial Sequence
  Description of Artificial Sequence: Synthetic oligonucleotide
  Target: LAMA2; (+) strand; PAM type: YTN; PAM sequence: CTT
tgcactataggcagcaggta

SEQ ID NO: 414063 - DNA, 20 bp, Artificial Sequence
  Description of Artificial Sequence: Synthetic oligonucleotide
  Target: LAMA2; (+) strand; PAM type: YTN; PAM sequence: TTT
gcactataggcagcaggtaa

SEQ ID NO: 414064 - DNA, 20 bp, Artificial Sequence
  Description of Artificial Sequence: Synthetic oligonucleotide
  Target: LAMA2; (+) strand; PAM type: YTN; PAM sequence: TTG
cactataggcagcaggtaaa

SEQ ID NO: 414065 - DNA, 20 bp, Artificial Sequence
  Description of Artificial Sequence: Synthetic oligonucleotide
  Target: LAMA2; (+) strand; PAM type: YTN; PAM sequence: CTA
taggcagcaggtaaacagag

SEQ ID NO: 414066 - DNA, 20 bp, Artificial Sequence
  Description of Artificial Sequence: Synthetic oligonucleotide
  Target: LAMA2; (+) strand; PAM type: YTN; PAM sequence: TTT
cacaagttttctatttggtt

SEQ ID NO: 414067 - DNA, 20 bp, Artificial Sequence
  Description of Artificial Sequence: Synthetic oligonucleotide
  Target: LAMA2; (+) strand; PAM type: YTN; PAM sequence: TTC
acaagttttctatttggtta

SEQ ID NO: 414068 - DNA, 20 bp, Artificial Sequence
  Description of Artificial Sequence: Synthetic oligonucleotide
  Target: LAMA2; (+) strand; PAM type: YTN; PAM sequence: TTT
tctatttggttattaaatag

SEQ ID NO: 414069 - DNA, 20 bp, Artificial Sequence
  Description of Artificial Sequence: Synthetic oligonucleotide
  Target: LAMA2; (+) strand; PAM type: YTN; PAM sequence: TTT
ctatttggttattaaatagg

SEQ ID NO: 414070 - DNA, 20 bp, Artificial Sequence
  Description of Artificial Sequence: Synthetic oligonucleotide
  Target: LAMA2; (+) strand; PAM type: YTN; PAM sequence: TTC
tatttggttattaaatagga

SEQ ID NO: 414071 - DNA, 20 bp, Artificial Sequence
  Description of Artificial Sequence: Synthetic oligonucleotide
  Target: LAMA2; (+) strand; PAM type: YTN; PAM sequence: CTA
tttggttattaaataggaat

SEQ ID NO: 414072 - DNA, 20 bp, Artificial Sequence
  Description of Artificial Sequence: Synthetic oligonucleotide
  Target: LAMA2; (+) strand; PAM type: YTN; PAM sequence: TTT
ggttattaaataggaatcgt

SEQ ID NO: 414073 - DNA, 20 bp, Artificial Sequence
  Description of Artificial Sequence: Synthetic oligonucleotide
  Target: LAMA2; (+) strand; PAM type: YTN; PAM sequence: TTG
gttattaaataggaatcgta

SEQ ID NO: 414074 - DNA, 20 bp, Artificial Sequence
  Description of Artificial Sequence: Synthetic oligonucleotide
  Target: LAMA2; (+) strand; PAM type: YTN; PAM sequence: TTA
ttaaataggaatcgtacttc

SEQ ID NO: 414075 - DNA, 20 bp, Artificial Sequence
  Description of Artificial Sequence: Synthetic oligonucleotide
  Target: LAMA2; (+) strand; PAM type: YTN; PAM sequence: TTA
aataggaatcgtacttcaac

SEQ ID NO: 414076 - DNA, 20 bp, Artificial Sequence
  Description of Artificial Sequence: Synthetic oligonucleotide
  Target: LAMA2; (+) strand; PAM type: YTN; PAM sequence: CTT
caactcagttcacgtttcca

SEQ ID NO: 414077 - DNA, 20 bp, Artificial Sequence
  Description of Artificial Sequence: Synthetic oligonucleotide
  Target: LAMA2; (+) strand; PAM type: YTN; PAM sequence: TTC
aactcagttcacgtttccac

SEQ ID NO: 414078 - DNA, 20 bp, Artificial Sequence
  Description of Artificial Sequence: Synthetic oligonucleotide
  Target: LAMA2; (+) strand; PAM type: YTN; PAM sequence: CTC
agttcacgtttccaccctta

SEQ ID NO: 414079 - DNA, 20 bp, Artificial Sequence
  Description of Artificial Sequence: Synthetic oligonucleotide
  Target: LAMA2; (+) strand; PAM type: YTN; PAM sequence: TTC
acgtttccacccttagtgtt

SEQ ID NO: 414080 - DNA, 20 bp, Artificial Sequence
  Description of Artificial Sequence: Synthetic oligonucleotide
  Target: LAMA2; (+) strand; PAM type: YTN; PAM sequence: TTT
ccacccttagtgttgcctcc

SEQ ID NO: 414081 - DNA, 20 bp, Artificial Sequence
  Description of Artificial Sequence: Synthetic oligonucleotide
  Target: LAMA2; (+) strand; PAM type: YTN; PAM sequence: TTC
cacccttagtgttgcctccc

SEQ ID NO: 414082 - DNA, 20 bp, Artificial Sequence
  Description of Artificial Sequence: Synthetic oligonucleotide
  Target: LAMA2; (+) strand; PAM type: YTN; PAM sequence: CTT
agtgttgcctcccaagaaga

SEQ ID NO: 414083 - DNA, 20 bp, Artificial Sequence
  Description of Artificial Sequence: Synthetic oligonucleotide
  Target: LAMA2; (+) strand; PAM type: YTN; PAM sequence: TTA
gtgttgcctcccaagaagaa

SEQ ID NO: 414084 - DNA, 20 bp, Artificial Sequence
  Description of Artificial Sequence: Synthetic oligonucleotide
  Target: LAMA2; (+) strand; PAM type: YTN; PAM sequence: TTG
cctcccaagaagaaaaatca

SEQ ID NO: 414085 - DNA, 20 bp, Artificial Sequence
  Description of Artificial Sequence: Synthetic oligonucleotide
  Target: LAMA2; (+) strand; PAM type: YTN; PAM sequence: CTC
ccaagaagaaaaatcacaca

SEQ ID NO: 414086 - DNA, 20 bp, Artificial Sequence
  Description of Artificial Sequence: Synthetic oligonucleotide
  Target: LAMA2; (+) strand; PAM type: YTN; PAM sequence: CTA
aaatagttttttcttgcttt

SEQ ID NO: 414087 - DNA, 20 bp, Artificial Sequence
  Description of Artificial Sequence: Synthetic oligonucleotide
  Target: LAMA2; (+) strand; PAM type: YTN; PAM sequence: TTT
tttcttgctttcttcctctt

SEQ ID NO: 414088 - DNA, 20 bp, Artificial Sequence
  Description of Artificial Sequence: Synthetic oligonucleotide
  Target: LAMA2; (+) strand; PAM type: YTN; PAM sequence: TTT
ttcttgctttcttcctcttt

SEQ ID NO: 414089 - DNA, 20 bp, Artificial Sequence
  Description of Artificial Sequence: Synthetic oligonucleotide
  Target: LAMA2; (+) strand; PAM type: YTN; PAM sequence: TTT
tcttgctttcttcctctttc

SEQ ID NO: 414090 - DNA, 20 bp, Artificial Sequence
  Description of Artificial Sequence: Synthetic oligonucleotide
  Target: LAMA2; (+) strand; PAM type: YTN; PAM sequence: TTT
cttgctttcttcctctttct

SEQ ID NO: 414091 - DNA, 20 bp, Artificial Sequence
  Description of Artificial Sequence: Synthetic oligonucleotide
  Target: LAMA2; (+) strand; PAM type: YTN; PAM sequence: TTC
ttgctttcttcctctttctg

SEQ ID NO: 414092 - DNA, 20 bp, Artificial Sequence
  Description of Artificial Sequence: Synthetic oligonucleotide
  Target: LAMA2; (+) strand; PAM type: YTN; PAM sequence: CTT
gctttcttcctctttctgct

SEQ ID NO: 414093 - DNA, 20 bp, Artificial Sequence
  Description of Artificial Sequence: Synthetic oligonucleotide
  Target: LAMA2; (+) strand; PAM type: YTN; PAM sequence: TTG
ctttcttcctctttctgctc

SEQ ID NO: 414094 - DNA, 20 bp, Artificial Sequence
  Description of Artificial Sequence: Synthetic oligonucleotide
  Target: LAMA2; (+) strand; PAM type: YTN; PAM sequence: CTT
tcttcctctttctgctcaat

SEQ ID NO: 414095 - DNA, 20 bp, Artificial Sequence
  Description of Artificial Sequence: Synthetic oligonucleotide
  Target: LAMA2; (+) strand; PAM type: YTN; PAM sequence: TTT
cttcctctttctgctcaatt

SEQ ID NO: 414096 - DNA, 20 bp, Artificial Sequence
  Description of Artificial Sequence: Synthetic oligonucleotide
  Target: LAMA2; (+) strand; PAM type: YTN; PAM sequence: TTC
ttcctctttctgctcaattt

SEQ ID NO: 414097 - DNA, 20 bp, Artificial Sequence
  Description of Artificial Sequence: Synthetic oligonucleotide
  Target: LAMA2; (+) strand; PAM type: YTN; PAM sequence: CTT
cctctttctgctcaattttc

SEQ ID NO: 414098 - DNA, 20 bp, Artificial Sequence
  Description of Artificial Sequence: Synthetic oligonucleotide
  Target: LAMA2; (+) strand; PAM type: YTN; PAM sequence: TTC
ctctttctgctcaattttca

SEQ ID NO: 414099 - DNA, 20 bp, Artificial Sequence
  Description of Artificial Sequence: Synthetic oligonucleotide
  Target: LAMA2; (+) strand; PAM type: YTN; PAM sequence: CTC
tttctgctcaattttcaaac

SEQ ID NO: 414100 - DNA, 20 bp, Artificial Sequence
  Description of Artificial Sequence: Synthetic oligonucleotide
  Target: LAMA2; (+) strand; PAM type: YTN; PAM sequence: CTT
tctgctcaattttcaaactg

SEQ ID NO: 414101 - DNA, 20 bp, Artificial Sequence
  Description of Artificial Sequence: Synthetic oligonucleotide
  Target: LAMA2; (+) strand; PAM type: YTN; PAM sequence: TTT
ctgctcaattttcaaactgt

SEQ ID NO: 414102 - DNA, 20 bp, Artificial Sequence
  Description of Artificial Sequence: Synthetic oligonucleotide
  Target: LAMA2; (+) strand; PAM type: YTN; PAM sequence: TTC
tgctcaattttcaaactgtc

SEQ ID NO: 414103 - DNA, 20 bp, Artificial Sequence
  Description of Artificial Sequence: Synthetic oligonucleotide
  Target: LAMA2; (+) strand; PAM type: YTN; PAM sequence: CTG
ctcaattttcaaactgtcct

SEQ ID NO: 414104 - DNA, 20 bp, Artificial Sequence
  Description of Artificial Sequence: Synthetic oligonucleotide
  Target: LAMA2; (+) strand; PAM type: YTN; PAM sequence: CTC
aattttcaaactgtcctcca

SEQ ID NO: 414105 - DNA, 20 bp, Artificial Sequence
  Description of Artificial Sequence: Synthetic oligonucleotide
  Target: LAMA2; (+) strand; PAM type: YTN; PAM sequence: TTT
tcaaactgtcctccaacaaa

SEQ ID NO: 414106 - DNA, 20 bp, Artificial Sequence
  Description of Artificial Sequence: Synthetic oligonucleotide
  Target: LAMA2; (+) strand; PAM type: YTN; PAM sequence: TTT
caaactgtcctccaacaaag

SEQ ID NO: 414107 - DNA, 20 bp, Artificial Sequence
  Description of Artificial Sequence: Synthetic oligonucleotide
  Target: LAMA2; (+) strand; PAM type: YTN; PAM sequence: TTC
aaactgtcctccaacaaagg

SEQ ID NO: 414108 - DNA, 20 bp, Artificial Sequence
  Description of Artificial Sequence: Synthetic oligonucleotide
  Target: LAMA2; (+) strand; PAM type: YTN; PAM sequence: CTG
tcctccaacaaaggtaatat

SEQ ID NO: 414109 - DNA, 20 bp, Artificial Sequence
  Description of Artificial Sequence: Synthetic oligonucleotide
  Target: LAMA2; (+) strand; PAM type: YTN; PAM sequence: CTC
caacaaaggtaatataggaa

SEQ ID NO: 414110 - DNA, 20 bp, Artificial Sequence
  Description of Artificial Sequence: Synthetic oligonucleotide
  Target: LAMA2; (+) strand; PAM type: YTN; PAM sequence: CTT
agaggtaaaaaggagtgaac

SEQ ID NO: 414111 - DNA, 20 bp, Artificial Sequence
  Description of Artificial Sequence: Synthetic oligonucleotide
  Target: LAMA2; (+) strand; PAM type: YTN; PAM sequence: TTA
gaggtaaaaaggagtgaaca

SEQ ID NO: 414112 - DNA, 20 bp, Artificial Sequence
  Description of Artificial Sequence: Synthetic oligonucleotide
  Target: LAMA2; (+) strand; PAM type: YTN; PAM sequence: CTC
aatagttttaccaaattttc

SEQ ID NO: 414113 - DNA, 20 bp, Artificial Sequence
  Description of Artificial Sequence: Synthetic oligonucleotide
  Target: LAMA2; (+) strand; PAM type: YTN; PAM sequence: TTT
taccaaattttcaaacatac

SEQ ID NO: 414114 - DNA, 20 bp, Artificial Sequence
  Description of Artificial Sequence: Synthetic oligonucleotide
  Target: LAMA2; (+) strand; PAM type: YTN; PAM sequence: TTT
accaaattttcaaacatact

SEQ ID NO: 414115 - DNA, 20 bp, Artificial Sequence
  Description of Artificial Sequence: Synthetic oligonucleotide
  Target: LAMA2; (+) strand; PAM type: YTN; PAM sequence: TTA
ccaaattttcaaacatactt

SEQ ID NO: 414116 - DNA, 20 bp, Artificial Sequence
  Description of Artificial Sequence: Synthetic oligonucleotide
  Target: LAMA2; (+) strand; PAM type: YTN; PAM sequence: TTT
tcaaacatacttttactaca

SEQ ID NO: 414117 - DNA, 20 bp, Artificial Sequence
  Description of Artificial Sequence: Synthetic oligonucleotide
  Target: LAMA2; (+) strand; PAM type: YTN; PAM sequence: TTT
caaacatacttttactacat

SEQ ID NO: 414118 - DNA, 20 bp, Artificial Sequence
  Description of Artificial Sequence: Synthetic oligonucleotide
  Target: LAMA2; (+) strand; PAM type: YTN; PAM sequence: TTC
aaacatacttttactacatc

SEQ ID NO: 414119 - DNA, 20 bp, Artificial Sequence
  Description of Artificial Sequence: Synthetic oligonucleotide
  Target: LAMA2; (+) strand; PAM type: YTN; PAM sequence: CTT
ttactacatctttttcaagt

SEQ ID NO: 414120 - DNA, 20 bp, Artificial Sequence
  Description of Artificial Sequence: Synthetic oligonucleotide
  Target: LAMA2; (+) strand; PAM type: YTN; PAM sequence: TTT
tactacatctttttcaagta

SEQ ID NO: 414121 - DNA, 20 bp, Artificial Sequence
  Description of Artificial Sequence: Synthetic oligonucleotide
  Target: LAMA2; (+) strand; PAM type: YTN; PAM sequence: TTT
actacatctttttcaagtaa

SEQ ID NO: 414122 - DNA, 20 bp, Artificial Sequence
  Description of Artificial Sequence: Synthetic oligonucleotide
  Target: LAMA2; (+) strand; PAM type: YTN; PAM sequence: TTA
ctacatctttttcaagtaac

SEQ ID NO: 414123 - DNA, 20 bp, Artificial Sequence
  Description of Artificial Sequence: Synthetic oligonucleotide
  Target: LAMA2; (+) strand; PAM type: YTN; PAM sequence: CTA
catctttttcaagtaacatg

SEQ ID NO: 414124 - DNA, 20 bp, Artificial Sequence
  Description of Artificial Sequence: Synthetic oligonucleotide
  Target: LAMA2; (+) strand; PAM type: YTN; PAM sequence: CTT
tttcaagtaacatgctctta

SEQ ID NO: 414125 - DNA, 20 bp, Artificial Sequence
  Description of Artificial Sequence: Synthetic oligonucleotide
  Target: LAMA2; (+) strand; PAM type: YTN; PAM sequence: TTT
ttcaagtaacatgctcttaa

SEQ ID NO: 414126 - DNA, 20 bp, Artificial Sequence
  Description of Artificial Sequence: Synthetic oligonucleotide
  Target: LAMA2; (+) strand; PAM type: YTN; PAM sequence: TTT
tcaagtaacatgctcttaag

SEQ ID NO: 414127 - DNA, 20 bp, Artificial Sequence
  Description of Artificial Sequence: Synthetic oligonucleotide
  Target: LAMA2; (+) strand; PAM type: YTN; PAM sequence: TTT
caagtaacatgctcttaagg

SEQ ID NO: 414128 - DNA, 20 bp, Artificial Sequence
  Description of Artificial Sequence: Synthetic oligonucleotide
  Target: LAMA2; (+) strand; PAM type: YTN; PAM sequence: TTC
aagtaacatgctcttaaggg

SEQ ID NO: 414129 - DNA, 20 bp, Artificial Sequence
  Description of Artificial Sequence: Synthetic oligonucleotide
  Target: LAMA2; (+) strand; PAM type: YTN; PAM sequence: CTC
ttaagggcagttaccatcga

SEQ ID NO: 414130 - DNA, 20 bp, Artificial Sequence
  Description of Artificial Sequence: Synthetic oligonucleotide
  Target: LAMA2; (+) strand; PAM type: YTN; PAM sequence: CTT
aagggcagttaccatcgata

SEQ ID NO: 414131 - DNA, 20 bp, Artificial Sequence
  Description of Artificial Sequence: Synthetic oligonucleotide
  Target: LAMA2; (+) strand; PAM type: YTN; PAM sequence: TTA
agggcagttaccatcgatat

SEQ ID NO: 414132 - DNA, 20 bp, Artificial Sequence
  Description of Artificial Sequence: Synthetic oligonucleotide
  Target: LAMA2; (+) strand; PAM type: YTN; PAM sequence: TTA
ccatcgatatgtcactatca

SEQ ID NO: 414133 - DNA, 20 bp, Artificial Sequence
  Description of Artificial Sequence: Synthetic oligonucleotide
  Target: LAMA2; (+) strand; PAM type: YTN; PAM sequence: CTA
tcatgtgcgtttctcaccaa

SEQ ID NO: 414134 - DNA, 20 bp, Artificial Sequence
  Description of Artificial Sequence: Synthetic oligonucleotide
  Target: LAMA2; (+) strand; PAM type: YTN; PAM sequence: TTT
ctcaccaagctccttttaca

SEQ ID NO: 414135 - DNA, 20 bp, Artificial Sequence
  Description of Artificial Sequence: Synthetic oligonucleotide
  Target: LAMA2; (+) strand; PAM type: YTN; PAM sequence: TTC
tcaccaagctccttttacat

SEQ ID NO: 414136 - DNA, 20 bp, Artificial Sequence
  Description of Artificial Sequence: Synthetic oligonucleotide
  Target: LAMA2; (+) strand; PAM type: YTN; PAM sequence: CTC
accaagctccttttacatgc

SEQ ID NO: 414137 - DNA, 20 bp, Artificial Sequence
  Description of Artificial Sequence: Synthetic oligonucleotide
  Target: LAMA2; (+) strand; PAM type: YTN; PAM sequence: CTC
cttttacatgcaaaagcctg

SEQ ID NO: 414138 - DNA, 20 bp, Artificial Sequence
  Description of Artificial Sequence: Synthetic oligonucleotide
  Target: LAMA2; (+) strand; PAM type: YTN; PAM sequence: CTT
ttacatgcaaaagcctgtta

SEQ ID NO: 414139 - DNA, 20 bp, Artificial Sequence
  Description of Artificial Sequence: Synthetic oligonucleotide
  Target: LAMA2; (+) strand; PAM type: YTN; PAM sequence: TTT
tacatgcaaaagcctgttat

SEQ ID NO: 414140 - DNA, 20 bp, Artificial Sequence
  Description of Artificial Sequence: Synthetic oligonucleotide
  Target: LAMA2; (+) strand; PAM type: YTN; PAM sequence: TTT
acatgcaaaagcctgttatg

SEQ ID NO: 414141 - DNA, 20 bp, Artificial Sequence
  Description of Artificial Sequence: Synthetic oligonucleotide
  Target: LAMA2; (+) strand; PAM type: YTN; PAM sequence: TTA
catgcaaaagcctgttatgc

SEQ ID NO: 414142 - DNA, 20 bp, Artificial Sequence
  Description of Artificial Sequence: Synthetic oligonucleotide
  Target: LAMA2; (+) strand; PAM type: YTN; PAM sequence: CTG
ttatgcaaactccacccaat

SEQ ID NO: 414143 - DNA, 20 bp, Artificial Sequence
  Description of Artificial Sequence: Synthetic oligonucleotide
  Target: LAMA2; (+) strand; PAM type: YTN; PAM sequence: TTA
tgcaaactccacccaatata

SEQ ID NO: 414144 - DNA, 20 bp, Artificial Sequence
  Description of Artificial Sequence: Synthetic oligonucleotide
  Target: LAMA2; (+) strand; PAM type: YTN; PAM sequence: CTC
cacccaatatagtaaacatt

SEQ ID NO: 414145 - DNA, 20 bp, Artificial Sequence
  Description of Artificial Sequence: Synthetic oligonucleotide
  Target: LAMA2; (+) strand; PAM type: YTN; PAM sequence: TTT
cattaataattacatcaata

SEQ ID NO: 414146 - DNA, 20 bp, Artificial Sequence
  Description of Artificial Sequence: Synthetic oligonucleotide
  Target: LAMA2; (+) strand; PAM type: YTN; PAM sequence: TTC
attaataattacatcaatag

SEQ ID NO: 414147 - DNA, 20 bp, Artificial Sequence
  Description of Artificial Sequence: Synthetic oligonucleotide
  Target: LAMA2; (+) strand; PAM type: YTN; PAM sequence: TTA
ataattacatcaatagagtt

SEQ ID NO: 414148 - DNA, 20 bp, Artificial Sequence
  Description of Artificial Sequence: Synthetic oligonucleotide
  Target: LAMA2; (+) strand; PAM type: YTN; PAM sequence: TTA
catcaatagagtttacaaac

SEQ ID NO: 414149 - DNA, 20 bp, Artificial Sequence
  Description of Artificial Sequence: Synthetic oligonucleotide
  Target: LAMA2; (+) strand; PAM type: YTN; PAM sequence: TTT
acaaacttttcacctattta

SEQ ID NO: 414150 - DNA, 20 bp, Artificial Sequence
  Description of Artificial Sequence: Synthetic oligonucleotide
  Target: LAMA2; (+) strand; PAM type: YTN; PAM sequence: TTA
caaacttttcacctatttac

SEQ ID NO: 414151 - DNA, 20 bp, Artificial Sequence
  Description of Artificial Sequence: Synthetic oligonucleotide
  Target: LAMA2; (+) strand; PAM type: YTN; PAM sequence: CTT
ttcacctatttacttgcatt

SEQ ID NO: 414152 - DNA, 20 bp, Artificial Sequence
  Description of Artificial Sequence: Synthetic oligonucleotide
  Target: LAMA2; (+) strand; PAM type: YTN; PAM sequence: TTT
tcacctatttacttgcattt

SEQ ID NO: 414153 - DNA, 20 bp, Artificial Sequence
  Description of Artificial Sequence: Synthetic oligonucleotide
  Target: LAMA2; (+) strand; PAM type: YTN; PAM sequence: TTT
cacctatttacttgcatttt

SEQ ID NO: 414154 - DNA, 20 bp, Artificial Sequence
  Description of Artificial Sequence: Synthetic oligonucleotide
  Target: LAMA2; (+) strand; PAM type: YTN; PAM sequence: TTC
acctatttacttgcattttt

SEQ ID NO: 414155 - DNA, 20 bp, Artificial Sequence
  Description of Artificial Sequence: Synthetic oligonucleotide
  Target: LAMA2; (+) strand; PAM type: YTN; PAM sequence: CTA
tttacttgcatttttaatct

SEQ ID NO: 414156 - DNA, 20 bp, Artificial Sequence
  Description of Artificial Sequence: Synthetic oligonucleotide
  Target: LAMA2; (+) strand; PAM type: YTN; PAM sequence: TTT
acttgcatttttaatctttc

SEQ ID NO: 414157 - DNA, 20 bp, Artificial Sequence
  Description of Artificial Sequence: Synthetic oligonucleotide
  Target: LAMA2; (+) strand; PAM type: YTN; PAM sequence: TTA
cttgcatttttaatctttct

SEQ ID NO: 414158 - DNA, 20 bp, Artificial Sequence
  Description of Artificial Sequence: Synthetic oligonucleotide
  Target: LAMA2; (+) strand; PAM type: YTN; PAM sequence: CTT
gcatttttaatctttcttct

SEQ ID NO: 414159 - DNA, 20 bp, Artificial Sequence
  Description of Artificial Sequence: Synthetic oligonucleotide
  Target: LAMA2; (+) strand; PAM type: YTN; PAM sequence: TTG
catttttaatctttcttctt

SEQ ID NO: 414160 - DNA, 20 bp, Artificial Sequence
  Description of Artificial Sequence: Synthetic oligonucleotide
  Target: LAMA2; (+) strand; PAM type: YTN; PAM sequence: TTT
ttaatctttcttcttaagac

SEQ ID NO: 414161 - DNA, 20 bp, Artificial Sequence
  Description of Artificial Sequence: Synthetic oligonucleotide
  Target: LAMA2; (+) strand; PAM type: YTN; PAM sequence: TTT
taatctttcttcttaagact

SEQ ID NO: 414162 - DNA, 20 bp, Artificial Sequence
  Description of Artificial Sequence: Synthetic oligonucleotide
  Target: LAMA2; (+) strand; PAM type: YTN; PAM sequence: TTT
aatctttcttcttaagactt

SEQ ID NO: 414163 - DNA, 20 bp, Artificial Sequence
  Description of Artificial Sequence: Synthetic oligonucleotide
  Target: LAMA2; (+) strand; PAM type: YTN; PAM sequence: TTA
atctttcttcttaagacttc

SEQ ID NO: 414164 - DNA, 20 bp, Artificial Sequence
  Description of Artificial Sequence: Synthetic oligonucleotide
  Target: LAMA2; (+) strand; PAM type: YTN; PAM sequence: CTT
tcttcttaagacttcatttc

SEQ ID NO: 414165 - DNA, 20 bp, Artificial Sequence
  Description of Artificial Sequence: Synthetic oligonucleotide
  Target: LAMA2; (+) strand; PAM type: YTN; PAM sequence: TTT
cttcttaagacttcatttct

SEQ ID NO: 414166 - DNA, 20 bp, Artificial Sequence
  Description of Artificial Sequence: Synthetic oligonucleotide
  Target: LAMA2; (+) strand; PAM type: YTN; PAM sequence: TTC
ttcttaagacttcatttctt

SEQ ID NO: 414167 - DNA, 20 bp, Artificial Sequence
  Description of Artificial Sequence: Synthetic oligonucleotide
  Target: LAMA2; (+) strand; PAM type: YTN; PAM sequence: CTT
cttaagacttcatttctttt

SEQ ID NO: 414168 - DNA, 20 bp, Artificial Sequence
  Description of Artificial Sequence: Synthetic oligonucleotide
  Target: LAMA2; (+) strand; PAM type: YTN; PAM sequence: TTC
ttaagacttcatttcttttc

SEQ ID NO: 414169 - DNA, 20 bp, Artificial Sequence
  Description of Artificial Sequence: Synthetic oligonucleotide
  Target: LAMA2; (+) strand; PAM type: YTN; PAM sequence: CTT
aagacttcatttcttttctt

SEQ ID NO: 414170 - DNA, 20 bp, Artificial Sequence
  Description of Artificial Sequence: Synthetic oligonucleotide
  Target: LAMA2; (+) strand; PAM type: YTN; PAM sequence: TTA
agacttcatttcttttcttt

SEQ ID NO: 414171 - DNA, 20 bp, Artificial Sequence
  Description of Artificial Sequence: Synthetic oligonucleotide
  Target: LAMA2; (+) strand; PAM type: YTN; PAM sequence: CTT
catttcttttcttttacctt

SEQ ID NO: 414172 - DNA, 20 bp, Artificial Sequence
  Description of Artificial Sequence: Synthetic oligonucleotide
  Target: LAMA2; (+) strand; PAM type: YTN; PAM sequence: TTC
atttcttttcttttaccttg

SEQ ID NO: 414173 - DNA, 20 bp, Artificial Sequence
  Description of Artificial Sequence: Synthetic oligonucleotide
  Target: LAMA2; (+) strand; PAM type: YTN; PAM sequence: TTT
cttttcttttaccttgtcga

SEQ ID NO: 414174 - DNA, 20 bp, Artificial Sequence
  Description of Artificial Sequence: Synthetic oligonucleotide
  Target: LAMA2; (+) strand; PAM type: YTN; PAM sequence: TTC
ttttcttttaccttgtcgaa

SEQ ID NO: 414175 - DNA, 20 bp, Artificial Sequence
  Description of Artificial Sequence: Synthetic oligonucleotide
  Target: LAMA2; (+) strand; PAM type: YTN; PAM sequence: CTT
ttcttttaccttgtcgaatg

SEQ ID NO: 414176 - DNA, 20 bp, Artificial Sequence
  Description of Artificial Sequence: Synthetic oligonucleotide
  Target: LAMA2; (+) strand; PAM type: YTN; PAM sequence: TTT
tcttttaccttgtcgaatgt

SEQ ID NO: 414177 - DNA, 20 bp, Artificial Sequence
  Description of Artificial Sequence: Synthetic oligonucleotide
  Target: LAMA2; (+) strand; PAM type: YTN; PAM sequence: TTT
cttttaccttgtcgaatgtc

SEQ ID NO: 414178 - DNA, 20 bp, Artificial Sequence
  Description of Artificial Sequence: Synthetic oligonucleotide
  Target: LAMA2; (+) strand; PAM type: YTN; PAM sequence: TTC
ttttaccttgtcgaatgtct

SEQ ID NO: 414179 - DNA, 20 bp, Artificial Sequence
  Description of Artificial Sequence: Synthetic oligonucleotide
  Target: LAMA2; (+) strand; PAM type: YTN; PAM sequence: CTT
ttaccttgtcgaatgtcttg

SEQ ID NO: 414180 - DNA, 20 bp, Artificial Sequence
  Description of Artificial Sequence: Synthetic oligonucleotide
  Target: LAMA2; (+) strand; PAM type: YTN; PAM sequence: TTT
taccttgtcgaatgtcttgc

SEQ ID NO: 414181 - DNA, 20 bp, Artificial Sequence
  Description of Artificial Sequence: Synthetic oligonucleotide
  Target: LAMA2; (+) strand; PAM type: YTN; PAM sequence: TTT
accttgtcgaatgtcttgcc

SEQ ID NO: 414182 - DNA, 20 bp, Artificial Sequence
  Description of Artificial Sequence: Synthetic oligonucleotide
  Target: LAMA2; (+) strand; PAM type: YTN; PAM sequence: TTA
ccttgtcgaatgtcttgcca

SEQ ID NO: 414183 - DNA, 20 bp, Artificial Sequence
  Description of Artificial Sequence: Synthetic oligonucleotide
  Target: LAMA2; (+) strand; PAM type: YTN; PAM sequence: CTT
gtcgaatgtcttgccaaact

SEQ ID NO: 414184 - DNA, 20 bp, Artificial Sequence
  Description of Artificial Sequence: Synthetic oligonucleotide
  Target: LAMA2; (+) strand; PAM type: YTN; PAM sequence: TTG
tcgaatgtcttgccaaactg

SEQ ID NO: 414185 - DNA, 20 bp, Artificial Sequence
  Description of Artificial Sequence: Synthetic oligonucleotide
  Target: LAMA2; (+) strand; PAM type: YTN; PAM sequence: CTT
gccaaactgactaatgtttt

SEQ ID NO: 414186 - DNA, 20 bp, Artificial Sequence
  Description of Artificial Sequence: Synthetic oligonucleotide
  Target: LAMA2; (+) strand; PAM type: YTN; PAM sequence: TTG
ccaaactgactaatgttttt

SEQ ID NO: 414187 - DNA, 20 bp, Artificial Sequence
  Description of Artificial Sequence: Synthetic oligonucleotide
  Target: LAMA2; (+) strand; PAM type: YTN; PAM sequence: CTG
actaatgtttttagtgtttc

SEQ ID NO: 414188 - DNA, 20 bp, Artificial Sequence
  Description of Artificial Sequence: Synthetic oligonucleotide
  Target: LAMA2; (+) strand; PAM type: YTN; PAM sequence: CTA
atgtttttagtgtttcaata

SEQ ID NO: 414189 - DNA, 20 bp, Artificial Sequence
  Description of Artificial Sequence: Synthetic oligonucleotide
  Target: LAMA2; (+) strand; PAM type: YTN; PAM sequence: TTT
ttagtgtttcaatatgtttc

SEQ ID NO: 414190 - DNA, 20 bp, Artificial Sequence
  Description of Artificial Sequence: Synthetic oligonucleotide
  Target: LAMA2; (+) strand; PAM type: YTN; PAM sequence: TTT
tagtgtttcaatatgtttcg

SEQ ID NO: 414191 - DNA, 20 bp, Artificial Sequence
  Description of Artificial Sequence: Synthetic oligonucleotide
  Target: LAMA2; (+) strand; PAM type: YTN; PAM sequence: TTT
agtgtttcaatatgtttcgt

SEQ ID NO: 414192 - DNA, 20 bp, Artificial Sequence
  Description of Artificial Sequence: Synthetic oligonucleotide
  Target: LAMA2; (+) strand; PAM type: YTN; PAM sequence: TTA
gtgtttcaatatgtttcgtt

SEQ ID NO: 414193 - DNA, 20 bp, Artificial Sequence
  Description of Artificial Sequence: Synthetic oligonucleotide
  Target: LAMA2; (+) strand; PAM type: YTN; PAM sequence: TTT
caatatgtttcgtttcttca

SEQ ID NO: 414194 - DNA, 20 bp, Artificial Sequence
  Description of Artificial Sequence: Synthetic oligonucleotide
  Target: LAMA2; (+) strand; PAM type: YTN; PAM sequence: TTC
aatatgtttcgtttcttcac

SEQ ID NO: 414195 - DNA, 20 bp, Artificial Sequence
  Description of Artificial Sequence: Synthetic oligonucleotide
  Target: LAMA2; (+) strand; PAM type: YTN; PAM sequence: TTT
cgtttcttcaccagcttcaa

SEQ ID NO: 414196 - DNA, 20 bp, Artificial Sequence
  Description of Artificial Sequence: Synthetic oligonucleotide
  Target: LAMA2; (+) strand; PAM type: YTN; PAM sequence: TTC
gtttcttcaccagcttcaaa

SEQ ID NO: 414197 - DNA, 20 bp, Artificial Sequence
  Description of Artificial Sequence: Synthetic oligonucleotide
  Target: LAMA2; (+) strand; PAM type: YTN; PAM sequence: TTT
cttcaccagcttcaaaagaa

SEQ ID NO: 414198 - DNA, 20 bp, Artificial Sequence
  Description of Artificial Sequence: Synthetic oligonucleotide
  Target: LAMA2; (+) strand; PAM type: YTN; PAM sequence: TTC
ttcaccagcttcaaaagaat

SEQ ID NO: 414199 - DNA, 20 bp, Artificial Sequence
  Description of Artificial Sequence: Synthetic oligonucleotide
  Target: LAMA2; (+) strand; PAM type: YTN; PAM sequence: CTT
caccagcttcaaaagaattc

SEQ ID NO: 414200 - DNA, 20 bp, Artificial Sequence
  Description of Artificial Sequence: Synthetic oligonucleotide
  Target: LAMA2; (+) strand; PAM type: YTN; PAM sequence: TTC
accagcttcaaaagaattct

SEQ ID NO: 414201 - DNA, 20 bp, Artificial Sequence
  Description of Artificial Sequence: Synthetic oligonucleotide
  Target: LAMA2; (+) strand; PAM type: YTN; PAM sequence: CTT
caaaagaattctgtcatctc

SEQ ID NO: 414202 - DNA, 20 bp, Artificial Sequence
  Description of Artificial Sequence: Synthetic oligonucleotide
  Target: LAMA2; (+) strand; PAM type: YTN; PAM sequence: TTC
aaaagaattctgtcatctca

SEQ ID NO: 414203 - DNA, 20 bp, Artificial Sequence
  Description of Artificial Sequence: Synthetic oligonucleotide
  Target: LAMA2; (+) strand; PAM type: YTN; PAM sequence: TTC
tgtcatctcaaatttcaggg

SEQ ID NO: 414204 - DNA, 20 bp, Artificial Sequence
  Description of Artificial Sequence: Synthetic oligonucleotide
  Target: LAMA2; (+) strand; PAM type: YTN; PAM sequence: CTG
tcatctcaaatttcaggggc

SEQ ID NO: 414205 - DNA, 20 bp, Artificial Sequence
  Description of Artificial Sequence: Synthetic oligonucleotide
  Target: LAMA2; (+) strand; PAM type: YTN; PAM sequence: CTC
aaatttcaggggcttttcca

SEQ ID NO: 414206 - DNA, 20 bp, Artificial Sequence
  Description of Artificial Sequence: Synthetic oligonucleotide
  Target: LAMA2; (+) strand; PAM type: YTN; PAM sequence: TTT
caggggcttttccacattac

SEQ ID NO: 414207 - DNA, 20 bp, Artificial Sequence
  Description of Artificial Sequence: Synthetic oligonucleotide
  Target: LAMA2; (+) strand; PAM type: YTN; PAM sequence: TTC
aggggcttttccacattact

SEQ ID NO: 414208 - DNA, 20 bp, Artificial Sequence
  Description of Artificial Sequence: Synthetic oligonucleotide
  Target: LAMA2; (+) strand; PAM type: YTN; PAM sequence: CTT
ttccacattactaaaaacag

SEQ ID NO: 414209 - DNA, 20 bp, Artificial Sequence
  Description of Artificial Sequence: Synthetic oligonucleotide
  Target: LAMA2; (+) strand; PAM type: YTN; PAM sequence: TTT
tccacattactaaaaacaga

SEQ ID NO: 414210 - DNA, 20 bp, Artificial Sequence
  Description of Artificial Sequence: Synthetic oligonucleotide
  Target: LAMA2; (+) strand; PAM type: YTN; PAM sequence: TTT
ccacattactaaaaacagat

SEQ ID NO: 414211 - DNA, 20 bp, Artificial Sequence
  Description of Artificial Sequence: Synthetic oligonucleotide
  Target: LAMA2; (+) strand; PAM type: YTN; PAM sequence: TTC
cacattactaaaaacagatt

SEQ ID NO: 414212 - DNA, 20 bp, Artificial Sequence
  Description of Artificial Sequence: Synthetic oligonucleotide
  Target: LAMA2; (+) strand; PAM type: YTN; PAM sequence: TTA
ctaaaaacagatttttctca

SEQ ID NO: 414213 - DNA, 20 bp, Artificial Sequence
  Description of Artificial Sequence: Synthetic oligonucleotide
  Target: LAMA2; (+) strand; PAM type: YTN; PAM sequence: CTA
aaaacagatttttctcattt

SEQ ID NO: 414214 - DNA, 20 bp, Artificial Sequence
  Description of Artificial Sequence: Synthetic oligonucleotide
  Target: LAMA2; (+) strand; PAM type: YTN; PAM sequence: TTT
ttctcatttagaccagaact

SEQ ID NO: 414215 - DNA, 20 bp, Artificial Sequence
  Description of Artificial Sequence: Synthetic oligonucleotide
  Target: LAMA2; (+) strand; PAM type: YTN; PAM sequence: TTT
tctcatttagaccagaactt

SEQ ID NO: 414216 - DNA, 20 bp, Artificial Sequence
  Description of Artificial Sequence: Synthetic oligonucleotide
  Target: LAMA2; (+) strand; PAM type: YTN; PAM sequence: TTT
ctcatttagaccagaacttc

SEQ ID NO: 414217 - DNA, 20 bp, Artificial Sequence
  Description of Artificial Sequence: Synthetic oligonucleotide
  Target: LAMA2; (+) strand; PAM type: YTN; PAM sequence: TTC
tcatttagaccagaacttct

SEQ ID NO: 414218 - DNA, 20 bp, Artificial Sequence
  Description of Artificial Sequence: Synthetic oligonucleotide
  Target: LAMA2; (+) strand; PAM type: YTN; PAM sequence: CTC
atttagaccagaacttctag

SEQ ID NO: 414219 - DNA, 20 bp, Artificial Sequence
  Description of Artificial Sequence: Synthetic oligonucleotide
  Target: LAMA2; (+) strand; PAM type: YTN; PAM sequence: TTT
agaccagaacttctagtcta

SEQ ID NO: 414220 - DNA, 20 bp, Artificial Sequence
  Description of Artificial Sequence: Synthetic oligonucleotide
  Target: LAMA2; (+) strand; PAM type: YTN; PAM sequence: TTA
gaccagaacttctagtctaa

SEQ ID NO: 414221 - DNA, 20 bp, Artificial Sequence
  Description of Artificial Sequence: Synthetic oligonucleotide
  Target: LAMA2; (+) strand; PAM type: YTN; PAM sequence: CTT
ctagtctaagttcttcattg

SEQ ID NO: 414222 - DNA, 20 bp, Artificial Sequence
  Description of Artificial Sequence: Synthetic oligonucleotide
  Target: LAMA2; (+) strand; PAM type: YTN; PAM sequence: TTC
tagtctaagttcttcattgt

SEQ ID NO: 414223 - DNA, 20 bp, Artificial Sequence
  Description of Artificial Sequence: Synthetic oligonucleotide
  Target: LAMA2; (+) strand; PAM type: YTN; PAM sequence: CTA
gtctaagttcttcattgtta

SEQ ID NO: 414224 - DNA, 20 bp, Artificial Sequence
  Description of Artificial Sequence: Synthetic oligonucleotide
  Target: LAMA2; (+) strand; PAM type: YTN; PAM sequence: CTA
agttcttcattgttaggaat

SEQ ID NO: 414225 - DNA, 20 bp, Artificial Sequence
  Description of Artificial Sequence: Synthetic oligonucleotide
  Target: LAMA2; (+) strand; PAM type: YTN; PAM sequence: TTC
ttcattgttaggaatttaac

SEQ ID NO: 414226 - DNA, 20 bp, Artificial Sequence
  Description of Artificial Sequence: Synthetic oligonucleotide
  Target: LAMA2; (+) strand; PAM type: YTN; PAM sequence: CTT
cattgttaggaatttaactg

SEQ ID NO: 414227 - DNA, 20 bp, Artificial Sequence
  Description of Artificial Sequence: Synthetic oligonucleotide
  Target: LAMA2; (+) strand; PAM type: YTN; PAM sequence: TTC
attgttaggaatttaactgg

SEQ ID NO: 414228 - DNA, 20 bp, Artificial Sequence
  Description of Artificial Sequence: Synthetic oligonucleotide
  Target: LAMA2; (+) strand; PAM type: YTN; PAM sequence: TTG
ttaggaatttaactggcctt

SEQ ID NO: 414229 - DNA, 20 bp, Artificial Sequence
  Description of Artificial Sequence: Synthetic oligonucleotide
  Target: LAMA2; (+) strand; PAM type: YTN; PAM sequence: TTA
ggaatttaactggccttctg

SEQ ID NO: 414230 - DNA, 20 bp, Artificial Sequence
  Description of Artificial Sequence: Synthetic oligonucleotide
  Target: LAMA2; (+) strand; PAM type: YTN; PAM sequence: TTT
aactggccttctggctcagg

SEQ ID NO: 414231 - DNA, 20 bp, Artificial Sequence
  Description of Artificial Sequence: Synthetic oligonucleotide
  Target: LAMA2; (+) strand; PAM type: YTN; PAM sequence: TTA
actggccttctggctcaggt

SEQ ID NO: 414232 - DNA, 20 bp, Artificial Sequence
  Description of Artificial Sequence: Synthetic oligonucleotide
  Target: LAMA2; (+) strand; PAM type: YTN; PAM sequence: CTG
gccttctggctcaggtcttt

SEQ ID NO: 414233 - DNA, 20 bp, Artificial Sequence
  Description of Artificial Sequence: Synthetic oligonucleotide
  Target: LAMA2; (+) strand; PAM type: YTN; PAM sequence: CTT
ctggctcaggtctttggcac

SEQ ID NO: 414234 - DNA, 20 bp, Artificial Sequence
  Description of Artificial Sequence: Synthetic oligonucleotide
  Target: LAMA2; (+) strand; PAM type: YTN; PAM sequence: TTC
tggctcaggtctttggcacc

SEQ ID NO: 414235 - DNA, 20 bp, Artificial Sequence
  Description of Artificial Sequence: Synthetic oligonucleotide
  Target: LAMA2; (+) strand; PAM type: YTN; PAM sequence: CTG
gctcaggtctttggcacctg

SEQ ID NO: 414236 - DNA, 20 bp, Artificial Sequence
  Description of Artificial Sequence: Synthetic oligonucleotide
  Target: LAMA2; (+) strand; PAM type: YTN; PAM sequence: CTC
aggtctttggcacctgtgac

SEQ ID NO: 414237 - DNA, 20 bp, Artificial Sequence
  Description of Artificial Sequence: Synthetic oligonucleotide
  Target: LAMA2; (+) strand; PAM type: YTN; PAM sequence: CTT
tggcacctgtgacatgaaac

SEQ ID NO: 414238 - DNA, 20 bp, Artificial Sequence
  Description of Artificial Sequence: Synthetic oligonucleotide
  Target: LAMA2; (+) strand; PAM type: YTN; PAM sequence: TTT
ggcacctgtgacatgaaacg

SEQ ID NO: 414239 - DNA, 20 bp, Artificial Sequence
  Description of Artificial Sequence: Synthetic oligonucleotide
  Target: LAMA2; (+) strand; PAM type: YTN; PAM sequence: TTG
gcacctgtgacatgaaacgg

SEQ ID NO: 414240 - DNA, 20 bp, Artificial Sequence
  Description of Artificial Sequence: Synthetic oligonucleotide
  Target: LAMA2; (+) strand; PAM type: YTN; PAM sequence: CTG
tgacatgaaacgggctccaa

SEQ ID NO: 414241 - DNA, 20 bp, Artificial Sequence
  Description of Artificial Sequence: Synthetic oligonucleotide
  Target: LAMA2; (+) strand; PAM type: YTN; PAM sequence: CTC
caaaatgtaatttatgtaac

SEQ ID NO: 414242 - DNA, 20 bp, Artificial Sequence
  Description of Artificial Sequence: Synthetic oligonucleotide
  Target: LAMA2; (+) strand; PAM type: YTN; PAM sequence: TTT
atgtaactctcaatcttgta

SEQ ID NO: 414243 - DNA, 20 bp, Artificial Sequence
  Description of Artificial Sequence: Synthetic oligonucleotide
  Target: LAMA2; (+) strand; PAM type: YTN; PAM sequence: TTA
tgtaactctcaatcttgtat

SEQ ID NO: 414244 - DNA, 20 bp, Artificial Sequence
  Description of Artificial Sequence: Synthetic oligonucleotide
  Target: LAMA2; (+) strand; PAM type: YTN; PAM sequence: CTC
tcaatcttgtatataaaatg

SEQ ID NO: 414245 - DNA, 20 bp, Artificial Sequence
  Description of Artificial Sequence: Synthetic oligonucleotide
  Target: LAMA2; (+) strand; PAM type: YTN; PAM sequence: CTC
aatcttgtatataaaatgaa

SEQ ID NO: 414246 - DNA, 20 bp, Artificial Sequence
  Description of Artificial Sequence: Synthetic oligonucleotide
  Target: LAMA2; (+) strand; PAM type: YTN; PAM sequence: CTT
gtatataaaatgaaatccat

SEQ ID NO: 414247 - DNA, 20 bp, Artificial Sequence
  Description of Artificial Sequence: Synthetic oligonucleotide
  Target: LAMA2; (+) strand; PAM type: YTN; PAM sequence: TTG
tatataaaatgaaatccatg

SEQ ID NO: 414248 - DNA, 20 bp, Artificial Sequence
  Description of Artificial Sequence: Synthetic oligonucleotide
  Target: LAMA2; (+) strand; PAM type: YTN; PAM sequence: TTA
aaacatcaaaagtttaaaat

SEQ ID NO: 414249 - DNA, 20 bp, Artificial Sequence
  Description of Artificial Sequence: Synthetic oligonucleotide
  Target: LAMA2; (+) strand; PAM type: YTN; PAM sequence: TTT
aaaatttaaaaaatccttta

SEQ ID NO: 414250 - DNA, 20 bp, Artificial Sequence
  Description of Artificial Sequence: Synthetic oligonucleotide
  Target: LAMA2; (+) strand; PAM type: YTN; PAM sequence: TTA
aaatttaaaaaatcctttac

SEQ ID NO: 414251 - DNA, 20 bp, Artificial Sequence
  Description of Artificial Sequence: Synthetic oligonucleotide
  Target: LAMA2; (+) strand; PAM type: YTN; PAM sequence: TTT
aaaaaatcctttactttgaa

SEQ ID NO: 414252 - DNA, 20 bp, Artificial Sequence
  Description of Artificial Sequence: Synthetic oligonucleotide
  Target: LAMA2; (+) strand; PAM type: YTN; PAM sequence: TTA
aaaaatcctttactttgaat

SEQ ID NO: 414253 - DNA, 20 bp, Artificial Sequence
  Description of Artificial Sequence: Synthetic oligonucleotide
  Target: LAMA2; (+) strand; PAM type: YTN; PAM sequence: CTT
tactttgaatttgtaaacca

SEQ ID NO: 414254 - DNA, 20 bp, Artificial Sequence
  Description of Artificial Sequence: Synthetic oligonucleotide
  Target: LAMA2; (+) strand; PAM type: YTN; PAM sequence: TTT
actttgaatttgtaaaccaa

SEQ ID NO: 414255 - DNA, 20 bp, Artificial Sequence
  Description of Artificial Sequence: Synthetic oligonucleotide
  Target: LAMA2; (+) strand; PAM type: YTN; PAM sequence: TTA
ctttgaatttgtaaaccaaa

SEQ ID NO: 414256 - DNA, 20 bp, Artificial Sequence
  Description of Artificial Sequence: Synthetic oligonucleotide
  Target: LAMA2; (+) strand; PAM type: YTN; PAM sequence: CTT
tgaatttgtaaaccaaatta

SEQ ID NO: 414257 - DNA, 20 bp, Artificial Sequence
  Description of Artificial Sequence: Synthetic oligonucleotide
  Target: LAMA2; (+) strand; PAM type: YTN; PAM sequence: TTT
gaatttgtaaaccaaattaa

SEQ ID NO: 414258 - DNA, 20 bp, Artificial Sequence
  Description of Artificial Sequence: Synthetic oligonucleotide
  Target: LAMA2; (+) strand; PAM type: YTN; PAM sequence: TTG
aatttgtaaaccaaattaat

SEQ ID NO: 414259 - DNA, 20 bp, Artificial Sequence
  Description of Artificial Sequence: Synthetic oligonucleotide
  Target: LAMA2; (+) strand; PAM type: YTN; PAM sequence: TTT
gtaaaccaaattaatgagtc

SEQ ID NO: 414260 - DNA, 20 bp, Artificial Sequence
  Description of Artificial Sequence: Synthetic oligonucleotide
  Target: LAMA2; (+) strand; PAM type: YTN; PAM sequence: TTG
taaaccaaattaatgagtca

SEQ ID NO: 414261 - DNA, 20 bp, Artificial Sequence
  Description of Artificial Sequence: Synthetic oligonucleotide
  Target: LAMA2; (+) strand; PAM type: YTN; PAM sequence: TTA
atgagtcactttaaacaata

SEQ ID NO: 414262 - DNA, 20 bp, Artificial Sequence
  Description of Artificial Sequence: Synthetic oligonucleotide
  Target: LAMA2; (+) strand; PAM type: YTN; PAM sequence: CTT
taaacaatatcttttaagaa

SEQ ID NO: 414263 - DNA, 20 bp, Artificial Sequence
  Description of Artificial Sequence: Synthetic oligonucleotide
  Target: LAMA2; (+) strand; PAM type: YTN; PAM sequence: TTT
aaacaatatcttttaagaaa

SEQ ID NO: 414264 - DNA, 20 bp, Artificial Sequence
  Description of Artificial Sequence: Synthetic oligonucleotide
  Target: LAMA2; (+) strand; PAM type: YTN; PAM sequence: TTA
aacaatatcttttaagaaaa

SEQ ID NO: 414265 - DNA, 20 bp, Artificial Sequence
  Description of Artificial Sequence: Synthetic oligonucleotide
  Target: LAMA2; (+) strand; PAM type: YTN; PAM sequence: CTT
ttaagaaaattttataaggt

SEQ ID NO: 414266 - DNA, 20 bp, Artificial Sequence
  Description of Artificial Sequence: Synthetic oligonucleotide
  Target: LAMA2; (+) strand; PAM type: YTN; PAM sequence: TTT
taagaaaattttataaggtt

SEQ ID NO: 414267 - DNA, 20 bp, Artificial Sequence
  Description of Artificial Sequence: Synthetic oligonucleotide
  Target: LAMA2; (+) strand; PAM type: YTN; PAM sequence: TTT
aagaaaattttataaggttc

SEQ ID NO: 414268 - DNA, 20 bp, Artificial Sequence
  Description of Artificial Sequence: Synthetic oligonucleotide
  Target: LAMA2; (+) strand; PAM type: YTN; PAM sequence: TTA
agaaaattttataaggttca

SEQ ID NO: 414269 - DNA, 20 bp, Artificial Sequence
  Description of Artificial Sequence: Synthetic oligonucleotide
  Target: LAMA2; (+) strand; PAM type: YTN; PAM sequence: TTT
tataaggttcagtcagaact

SEQ ID NO: 414270 - DNA, 20 bp, Artificial Sequence
  Description of Artificial Sequence: Synthetic oligonucleotide
  Target: LAMA2; (+) strand; PAM type: YTN; PAM sequence: TTT
ataaggttcagtcagaactc

SEQ ID NO: 414271 - DNA, 20 bp, Artificial Sequence
  Description of Artificial Sequence: Synthetic oligonucleotide
  Target: LAMA2; (+) strand; PAM type: YTN; PAM sequence: TTA
taaggttcagtcagaactct

SEQ ID NO: 414272 - DNA, 20 bp, Artificial Sequence
  Description of Artificial Sequence: Synthetic oligonucleotide
  Target: LAMA2; (+) strand; PAM type: YTN; PAM sequence: TTC
agtcagaactctcacattct

SEQ ID NO: 414273 - DNA, 20 bp, Artificial Sequence
  Description of Artificial Sequence: Synthetic oligonucleotide
  Target: LAMA2; (+) strand; PAM type: YTN; PAM sequence: CTC
tcacattctaaaaagacgtg

SEQ ID NO: 414274 - DNA, 20 bp, Artificial Sequence
  Description of Artificial Sequence: Synthetic oligonucleotide
  Target: LAMA2; (+) strand; PAM type: YTN; PAM sequence: CTC
acattctaaaaagacgtgag

SEQ ID NO: 414275 - DNA, 20 bp, Artificial Sequence
  Description of Artificial Sequence: Synthetic oligonucleotide
  Target: LAMA2; (+) strand; PAM type: YTN; PAM sequence: TTC
taaaaagacgtgaggtagaa

SEQ ID NO: 414276 - DNA, 20 bp, Artificial Sequence
  Description of Artificial Sequence: Synthetic oligonucleotide
  Target: LAMA2; (+) strand; PAM type: YTN; PAM sequence: CTA
aaaagacgtgaggtagaatt

SEQ ID NO: 414277 - DNA, 20 bp, Artificial Sequence
  Description of Artificial Sequence: Synthetic oligonucleotide
  Target: LAMA2; (+) strand; PAM type: YTN; PAM sequence: TTT
ttccctgtgtacactaggtc

SEQ ID NO: 414278 - DNA, 20 bp, Artificial Sequence
  Description of Artificial Sequence: Synthetic oligonucleotide
  Target: LAMA2; (+) strand; PAM type: YTN; PAM sequence: TTT
tccctgtgtacactaggtcc

SEQ ID NO: 414279 - DNA, 20 bp, Artificial Sequence
  Description of Artificial Sequence: Synthetic oligonucleotide
  Target: LAMA2; (+) strand; PAM type: YTN; PAM sequence: TTT
ccctgtgtacactaggtcct

SEQ ID NO: 414280 - DNA, 20 bp, Artificial Sequence
  Description of Artificial Sequence: Synthetic oligonucleotide
  Target: LAMA2; (+) strand; PAM type: YTN; PAM sequence: TTC
cctgtgtacactaggtcctt

SEQ ID NO: 414281 - DNA, 20 bp, Artificial Sequence
  Description of Artificial Sequence: Synthetic oligonucleotide
  Target: LAMA2; (+) strand; PAM type: YTN; PAM sequence: CTG
tgtacactaggtccttttct

SEQ ID NO: 414282 - DNA, 20 bp, Artificial Sequence
  Description of Artificial Sequence: Synthetic oligonucleotide
  Target: LAMA2; (+) strand; PAM type: YTN; PAM sequence: CTA
ggtccttttcttgtcacctg

SEQ ID NO: 414283 - DNA, 20 bp, Artificial Sequence
  Description of Artificial Sequence: Synthetic oligonucleotide
  Target: LAMA2; (+) strand; PAM type: YTN; PAM sequence: CTT
ttcttgtcacctggcctcaa

SEQ ID NO: 414284 - DNA, 20 bp, Artificial Sequence
  Description of Artificial Sequence: Synthetic oligonucleotide
  Target: LAMA2; (+) strand; PAM type: YTN; PAM sequence: TTT
tcttgtcacctggcctcaaa

SEQ ID NO: 414285 - DNA, 20 bp, Artificial Sequence
  Description of Artificial Sequence: Synthetic oligonucleotide
  Target: LAMA2; (+) strand; PAM type: YTN; PAM sequence: TTT
cttgtcacctggcctcaaat

SEQ ID NO: 414286 - DNA, 20 bp, Artificial Sequence
  Description of Artificial Sequence: Synthetic oligonucleotide
  Target: LAMA2; (+) strand; PAM type: YTN; PAM sequence: TTC
ttgtcacctggcctcaaatt

SEQ ID NO: 414287 - DNA, 20 bp, Artificial Sequence
  Description of Artificial Sequence: Synthetic oligonucleotide
  Target: LAMA2; (+) strand; PAM type: YTN; PAM sequence: CTT
gtcacctggcctcaaatttt

SEQ ID NO: 414288 - DNA, 20 bp, Artificial Sequence
  Description of Artificial Sequence: Synthetic oligonucleotide
  Target: LAMA2; (+) strand; PAM type: YTN; PAM sequence: TTG
tcacctggcctcaaattttt

SEQ ID NO: 414289 - DNA, 20 bp, Artificial Sequence
  Description of Artificial Sequence: Synthetic oligonucleotide
  Target: LAMA2; (+) strand; PAM type: YTN; PAM sequence: CTG
gcctcaaatttttctgaaag

SEQ ID NO: 414290 - DNA, 20 bp, Artificial Sequence
  Description of Artificial Sequence: Synthetic oligonucleotide
  Target: LAMA2; (+) strand; PAM type: YTN; PAM sequence: CTC
aaatttttctgaaagcagaa

SEQ ID NO: 414291 - DNA, 20 bp, Artificial Sequence
  Description of Artificial Sequence: Synthetic oligonucleotide
  Target: LAMA2; (+) strand; PAM type: YTN; PAM sequence: TTT
ttctgaaagcagaattatta

SEQ ID NO: 414292 - DNA, 20 bp, Artificial Sequence
  Description of Artificial Sequence: Synthetic oligonucleotide
  Target: LAMA2; (+) strand; PAM type: YTN; PAM sequence: TTT
tctgaaagcagaattattac

SEQ ID NO: 414293 - DNA, 20 bp, Artificial Sequence
  Description of Artificial Sequence: Synthetic oligonucleotide
  Target: LAMA2; (+) strand; PAM type: YTN; PAM sequence: TTT
ctgaaagcagaattattacc

SEQ ID NO: 414294 - DNA, 20 bp, Artificial Sequence
  Description of Artificial Sequence: Synthetic oligonucleotide
  Target: LAMA2; (+) strand; PAM type: YTN; PAM sequence: TTC
tgaaagcagaattattacca

SEQ ID NO: 414295 - DNA, 20 bp, Artificial Sequence
  Description of Artificial Sequence: Synthetic oligonucleotide
  Target: LAMA2; (+) strand; PAM type: YTN; PAM sequence: CTG
aaagcagaattattaccagc

SEQ ID NO: 414296 - DNA, 20 bp, Artificial Sequence
  Description of Artificial Sequence: Synthetic oligonucleotide
  Target: LAMA2; (+) strand; PAM type: YTN; PAM sequence: TTA
ttaccagctttacgtatctt

SEQ ID NO: 414297 - DNA, 20 bp, Artificial Sequence
  Description of Artificial Sequence: Synthetic oligonucleotide
  Target: LAMA2; (+) strand; PAM type: YTN; PAM sequence: TTA
ccagctttacgtatcttgcc

SEQ ID NO: 414298 - DNA, 20 bp, Artificial Sequence
  Description of Artificial Sequence: Synthetic oligonucleotide
  Target: LAMA2; (+) strand; PAM type: YTN; PAM sequence: CTT
tacgtatcttgcctattaac

SEQ ID NO: 414299 - DNA, 20 bp, Artificial Sequence
  Description of Artificial Sequence: Synthetic oligonucleotide
  Target: LAMA2; (+) strand; PAM type: YTN; PAM sequence: TTT
acgtatcttgcctattaact

SEQ ID NO: 414300 - DNA, 20 bp, Artificial Sequence
  Description of Artificial Sequence: Synthetic oligonucleotide
  Target: LAMA2; (+) strand; PAM type: YTN; PAM sequence: TTA
cgtatcttgcctattaactc

SEQ ID NO: 414301 - DNA, 20 bp, Artificial Sequence
  Description of Artificial Sequence: Synthetic oligonucleotide
  Target: LAMA2; (+) strand; PAM type: YTN; PAM sequence: CTT
gcctattaactcccaacaat

SEQ ID NO: 414302 - DNA, 20 bp, Artificial Sequence
  Description of Artificial Sequence: Synthetic oligonucleotide
  Target: LAMA2; (+) strand; PAM type: YTN; PAM sequence: TTG
cctattaactcccaacaatg

SEQ ID NO: 414303 - DNA, 20 bp, Artificial Sequence
  Description of Artificial Sequence: Synthetic oligonucleotide
  Target: LAMA2; (+) strand; PAM type: YTN; PAM sequence: CTA
ttaactcccaacaatgcccc

SEQ ID NO: 414304 - DNA, 20 bp, Artificial Sequence
  Description of Artificial Sequence: Synthetic oligonucleotide
  Target: LAMA2; (+) strand; PAM type: YTN; PAM sequence: TTA
actcccaacaatgccccaaa

SEQ ID NO: 414305 - DNA, 20 bp, Artificial Sequence
  Description of Artificial Sequence: Synthetic oligonucleotide
  Target: LAMA2; (+) strand; PAM type: YTN; PAM sequence: CTC
ccaacaatgccccaaagcaa

SEQ ID NO: 414306 - DNA, 20 bp, Artificial Sequence
  Description of Artificial Sequence: Synthetic oligonucleotide
  Target: LAMA2; (+) strand; PAM type: YTN; PAM sequence: TTT
gtggctcctggtgattagat

SEQ ID NO: 414307 - DNA, 20 bp, Artificial Sequence
  Description of Artificial Sequence: Synthetic oligonucleotide
  Target: LAMA2; (+) strand; PAM type: YTN; PAM sequence: TTG
tggctcctggtgattagatt

SEQ ID NO: 414308 - DNA, 20 bp, Artificial Sequence
  Description of Artificial Sequence: Synthetic oligonucleotide
  Target: LAMA2; (+) strand; PAM type: YTN; PAM sequence: CTC
ctggtgattagatttatact

SEQ ID NO: 414309 - DNA, 20 bp, Artificial Sequence
  Description of Artificial Sequence: Synthetic oligonucleotide
  Target: LAMA2; (+) strand; PAM type: YTN; PAM sequence: CTG
gtgattagatttatacttta

SEQ ID NO: 414310 - DNA, 20 bp, Artificial Sequence
  Description of Artificial Sequence: Synthetic oligonucleotide
  Target: LAMA2; (+) strand; PAM type: YTN; PAM sequence: TTA
gatttatactttaatttgtc

SEQ ID NO: 414311 - DNA, 20 bp, Artificial Sequence
  Description of Artificial Sequence: Synthetic oligonucleotide
  Target: LAMA2; (+) strand; PAM type: YTN; PAM sequence: TTT
atactttaatttgtcaagtt

SEQ ID NO: 414312 - DNA, 20 bp, Artificial Sequence
  Description of Artificial Sequence: Synthetic oligonucleotide
  Target: LAMA2; (+) strand; PAM type: YTN; PAM sequence: TTA
tactttaatttgtcaagttt

SEQ ID NO: 414313 - DNA, 20 bp, Artificial Sequence
  Description of Artificial Sequence: Synthetic oligonucleotide
  Target: LAMA2; (+) strand; PAM type: YTN; PAM sequence: CTT
taatttgtcaagttttaaaa

SEQ ID NO: 414314 - DNA, 20 bp, Artificial Sequence
  Description of Artificial Sequence: Synthetic oligonucleotide
  Target: LAMA2; (+) strand; PAM type: YTN; PAM sequence: TTT
aatttgtcaagttttaaaat

SEQ ID NO: 414315 - DNA, 20 bp, Artificial Sequence
  Description of Artificial Sequence: Synthetic oligonucleotide
  Target: LAMA2; (+) strand; PAM type: YTN; PAM sequence: TTA
atttgtcaagttttaaaatt

SEQ ID NO: 414316 - DNA, 20 bp, Artificial Sequence
  Description of Artificial Sequence: Synthetic oligonucleotide
  Target: LAMA2; (+) strand; PAM type: YTN; PAM sequence: TTT
gtcaagttttaaaatttttt

SEQ ID NO: 414317 - DNA, 20 bp, Artificial Sequence
  Description of Artificial Sequence: Synthetic oligonucleotide
  Target: LAMA2; (+) strand; PAM type: YTN; PAM sequence: TTG
tcaagttttaaaattttttt

SEQ ID NO: 414318 - DNA, 20 bp, Artificial Sequence
  Description of Artificial Sequence: Synthetic oligonucleotide
  Target: LAMA2; (+) strand; PAM type: YTN; PAM sequence: TTT
taaaatttttttcaatatgc

SEQ ID NO: 414319 - DNA, 20 bp, Artificial Sequence
  Description of Artificial Sequence: Synthetic oligonucleotide
  Target: LAMA2; (+) strand; PAM type: YTN; PAM sequence: TTT
aaaatttttttcaatatgcc

SEQ ID NO: 414320 - DNA, 20 bp, Artificial Sequence
  Description of Artificial Sequence: Synthetic oligonucleotide
  Target: LAMA2; (+) strand; PAM type: YTN; PAM sequence: TTA
aaatttttttcaatatgccc

SEQ ID NO: 414321 - DNA, 20 bp, Artificial Sequence
  Description of Artificial Sequence: Synthetic oligonucleotide
  Target: LAMA2; (+) strand; PAM type: YTN; PAM sequence: TTT
ttttcaatatgcccagttac

SEQ ID NO: 414322 - DNA, 20 bp, Artificial Sequence
  Description of Artificial Sequence: Synthetic oligonucleotide
  Target: LAMA2; (+) strand; PAM type: YTN; PAM sequence: TTT
tttcaatatgcccagttaca

SEQ ID NO: 414323 - DNA, 20 bp, Artificial Sequence
  Description of Artificial Sequence: Synthetic oligonucleotide
  Target: LAMA2; (+) strand; PAM type: YTN; PAM sequence: TTT
ttcaatatgcccagttacat

SEQ ID NO: 414324 - DNA, 20 bp, Artificial Sequence
  Description of Artificial Sequence: Synthetic oligonucleotide
  Target: LAMA2; (+) strand; PAM type: YTN; PAM sequence: TTT
tcaatatgcccagttacatc

SEQ ID NO: 414325 - DNA, 20 bp, Artificial Sequence
  Description of Artificial Sequence: Synthetic oligonucleotide
  Target: LAMA2; (+) strand; PAM type: YTN; PAM sequence: TTT
caatatgcccagttacatcc

SEQ ID NO: 414326 - DNA, 20 bp, Artificial Sequence
  Description of Artificial Sequence: Synthetic oligonucleotide
  Target: LAMA2; (+) strand; PAM type: YTN; PAM sequence: TTC
aatatgcccagttacatcca

SEQ ID NO: 414327 - DNA, 20 bp, Artificial Sequence
  Description of Artificial Sequence: Synthetic oligonucleotide
  Target: LAMA2; (+) strand; PAM type: YTN; PAM sequence: TTA
catccatttcaaatgattct

SEQ ID NO: 414328 - DNA, 20 bp, Artificial Sequence
  Description of Artificial Sequence: Synthetic oligonucleotide
  Target: LAMA2; (+) strand; PAM type: YTN; PAM sequence: TTT
caaatgattctggctgatgt

SEQ ID NO: 414329 - DNA, 20 bp, Artificial Sequence
  Description of Artificial Sequence: Synthetic oligonucleotide
  Target: LAMA2; (+) strand; PAM type: YTN; PAM sequence: TTC
aaatgattctggctgatgtc

SEQ ID NO: 414330 - DNA, 20 bp, Artificial Sequence
  Description of Artificial Sequence: Synthetic oligonucleotide
  Target: LAMA2; (+) strand; PAM type: YTN; PAM sequence: TTC
tggctgatgtctttcctaga

SEQ ID NO: 414331 - DNA, 20 bp, Artificial Sequence
  Description of Artificial Sequence: Synthetic oligonucleotide
  Target: LAMA2; (+) strand; PAM type: YTN; PAM sequence: CTG
gctgatgtctttcctagaga

SEQ ID NO: 414332 - DNA, 20 bp, Artificial Sequence
  Description of Artificial Sequence: Synthetic oligonucleotide
  Target: LAMA2; (+) strand; PAM type: YTN; PAM sequence: CTG
atgtctttcctagagacctg

SEQ ID NO: 414333 - DNA, 20 bp, Artificial Sequence
  Description of Artificial Sequence: Synthetic oligonucleotide
  Target: LAMA2; (+) strand; PAM type: YTN; PAM sequence: CTT
tcctagagacctgatcattt

SEQ ID NO: 414334 - DNA, 20 bp, Artificial Sequence
  Description of Artificial Sequence: Synthetic oligonucleotide
  Target: LAMA2; (+) strand; PAM type: YTN; PAM sequence: TTT
cctagagacctgatcatttg

SEQ ID NO: 414335 - DNA, 20 bp, Artificial Sequence
  Description of Artificial Sequence: Synthetic oligonucleotide
  Target: LAMA2; (+) strand; PAM type: YTN; PAM sequence: TTC
ctagagacctgatcatttgt

SEQ ID NO: 414336 - DNA, 20 bp, Artificial Sequence
  Description of Artificial Sequence: Synthetic oligonucleotide
  Target: LAMA2; (+) strand; PAM type: YTN; PAM sequence: CTA
gagacctgatcatttgtatg

SEQ ID NO: 414337 - DNA, 20 bp, Artificial Sequence
  Description of Artificial Sequence: Synthetic oligonucleotide
  Target: LAMA2; (+) strand; PAM type: YTN; PAM sequence: CTG
atcatttgtatgtgtgaacc

SEQ ID NO: 414338 - DNA, 20 bp, Artificial Sequence
  Description of Artificial Sequence: Synthetic oligonucleotide
  Target: LAMA2; (+) strand; PAM type: YTN; PAM sequence: TTT
gtatgtgtgaaccatcatga

SEQ ID NO: 414339 - DNA, 20 bp, Artificial Sequence
  Description of Artificial Sequence: Synthetic oligonucleotide
  Target: LAMA2; (+) strand; PAM type: YTN; PAM sequence: TTG
tatgtgtgaaccatcatgat

SEQ ID NO: 414340 - DNA, 20 bp, Artificial Sequence
  Description of Artificial Sequence: Synthetic oligonucleotide
  Target: LAMA2; (+) strand; PAM type: YTN; PAM sequence: CTT
ctttaatgaaaccatctgtg

SEQ ID NO: 414341 - DNA, 20 bp, Artificial Sequence
  Description of Artificial Sequence: Synthetic oligonucleotide
  Target: LAMA2; (+) strand; PAM type: YTN; PAM sequence: TTC
tttaatgaaaccatctgtga

SEQ ID NO: 414342 - DNA, 20 bp, Artificial Sequence
  Description of Artificial Sequence: Synthetic oligonucleotide
  Target: LAMA2; (+) strand; PAM type: YTN; PAM sequence: CTT
taatgaaaccatctgtgact

SEQ ID NO: 414343 - DNA, 20 bp, Artificial Sequence
  Description of Artificial Sequence: Synthetic oligonucleotide
  Target: LAMA2; (+) strand; PAM type: YTN; PAM sequence: TTT
aatgaaaccatctgtgactg

SEQ ID NO: 414344 - DNA, 20 bp, Artificial Sequence
  Description of Artificial Sequence: Synthetic oligonucleotide
  Target: LAMA2; (+) strand; PAM type: YTN; PAM sequence: TTA
atgaaaccatctgtgactgt

SEQ ID NO: 414345 - DNA, 20 bp, Artificial Sequence
  Description of Artificial Sequence: Synthetic oligonucleotide
  Target: LAMA2; (+) strand; PAM type: YTN; PAM sequence: CTG
tgactgttctatttcctact

SEQ ID NO: 414346 - DNA, 20 bp, Artificial Sequence
  Description of Artificial Sequence: Synthetic oligonucleotide
  Target: LAMA2; (+) strand; PAM type: YTN; PAM sequence: CTG
ttctatttcctactttccag

SEQ ID NO: 414347 - DNA, 20 bp, Artificial Sequence
  Description of Artificial Sequence: Synthetic oligonucleotide
  Target: LAMA2; (+) strand; PAM type: YTN; PAM sequence: TTC
tatttcctactttccagttg

SEQ ID NO: 414348 - DNA, 20 bp, Artificial Sequence
  Description of Artificial Sequence: Synthetic oligonucleotide
  Target: LAMA2; (+) strand; PAM type: YTN; PAM sequence: CTA
tttcctactttccagttgat

SEQ ID NO: 414349 - DNA, 20 bp, Artificial Sequence
  Description of Artificial Sequence: Synthetic oligonucleotide
  Target: LAMA2; (+) strand; PAM type: YTN; PAM sequence: TTT
cctactttccagttgatgtt

SEQ ID NO: 414350 - DNA, 20 bp, Artificial Sequence
  Description of Artificial Sequence: Synthetic oligonucleotide
  Target: LAMA2; (+) strand; PAM type: YTN; PAM sequence: TTC
ctactttccagttgatgttt

SEQ ID NO: 414351 - DNA, 20 bp, Artificial Sequence
  Description of Artificial Sequence: Synthetic oligonucleotide
  Target: LAMA2; (+) strand; PAM type: YTN; PAM sequence: CTA
ctttccagttgatgtttcat

SEQ ID NO: 414352 - DNA, 20 bp, Artificial Sequence
  Description of Artificial Sequence: Synthetic oligonucleotide
  Target: LAMA2; (+) strand; PAM type: YTN; PAM sequence: CTT
tccagttgatgtttcatgtg

SEQ ID NO: 414353 - DNA, 20 bp, Artificial Sequence
  Description of Artificial Sequence: Synthetic oligonucleotide
  Target: LAMA2; (+) strand; PAM type: YTN; PAM sequence: TTT
ccagttgatgtttcatgtgg

SEQ ID NO: 414354 - DNA, 20 bp, Artificial Sequence
  Description of Artificial Sequence: Synthetic oligonucleotide
  Target: LAMA2; (+) strand; PAM type: YTN; PAM sequence: TTC
cagttgatgtttcatgtgga

SEQ ID NO: 414355 - DNA, 20 bp, Artificial Sequence
  Description of Artificial Sequence: Synthetic oligonucleotide
  Target: LAMA2; (+) strand; PAM type: YTN; PAM sequence: TTG
atgtttcatgtggacaatgg

SEQ ID NO: 414356 - DNA, 20 bp, Artificial Sequence
  Description of Artificial Sequence: Synthetic oligonucleotide
  Target: LAMA2; (+) strand; PAM type: YTN; PAM sequence: TTT
catgtggacaatggtgcggg

SEQ ID NO: 414357 - DNA, 20 bp, Artificial Sequence
  Description of Artificial Sequence: Synthetic oligonucleotide
  Target: LAMA2; (+) strand; PAM type: YTN; PAM sequence: TTC
atgtggacaatggtgcgggc

SEQ ID NO: 414358 - DNA, 20 bp, Artificial Sequence
  Description of Artificial Sequence: Synthetic oligonucleotide
  Target: LAMA2; (+) strand; PAM type: YTN; PAM sequence: TTC
actgctgtctatgatgctgg

SEQ ID NO: 414359 - DNA, 20 bp, Artificial Sequence
  Description of Artificial Sequence: Synthetic oligonucleotide
  Target: LAMA2; (+) strand; PAM type: YTN; PAM sequence: CTG
ctgtctatgatgctggggtt

SEQ ID NO: 414360 - DNA, 20 bp, Artificial Sequence
  Description of Artificial Sequence: Synthetic oligonucleotide
  Target: LAMA2; (+) strand; PAM type: YTN; PAM sequence: CTG
tctatgatgctggggttcca

SEQ ID NO: 414361 - DNA, 20 bp, Artificial Sequence
  Description of Artificial Sequence: Synthetic oligonucleotide
  Target: LAMA2; (+) strand; PAM type: YTN; PAM sequence: CTA
tgatgctggggttccagggc

SEQ ID NO: 414362 - DNA, 20 bp, Artificial Sequence
  Description of Artificial Sequence: Synthetic oligonucleotide
  Target: LAMA2; (+) strand; PAM type: YTN; PAM sequence: CTG
gggttccagggcatttgtgt

SEQ ID NO: 414363 - DNA, 20 bp, Artificial Sequence
  Description of Artificial Sequence: Synthetic oligonucleotide
  Target: LAMA2; (+) strand; PAM type: YTN; PAM sequence: TTC
cagggcatttgtgtgatgga

SEQ ID NO: 414364 - DNA, 20 bp, Artificial Sequence
  Description of Artificial Sequence: Synthetic oligonucleotide
  Target: LAMA2; (+) strand; PAM type: YTN; PAM sequence: TTT
gtgtgatggacaatggcata

SEQ ID NO: 414365 - DNA, 20 bp, Artificial Sequence
  Description of Artificial Sequence: Synthetic oligonucleotide
  Target: LAMA2; (+) strand; PAM type: YTN; PAM sequence: TTG
tgtgatggacaatggcataa

SEQ ID NO: 414366 - DNA, 20 bp, Artificial Sequence
  Description of Artificial Sequence: Synthetic oligonucleotide
  Target: LAMA2; (+) strand; PAM type: YTN; PAM sequence: CTG
ccaacaagatcaaacaccgc

SEQ ID NO: 414367 - DNA, 20 bp, Artificial Sequence
  Description of Artificial Sequence: Synthetic oligonucleotide
  Target: LAMA2; (+) strand; PAM type: YTN; PAM sequence: TTG
agctcacagtcgatgggaac

SEQ ID NO: 414368 - DNA, 20 bp, Artificial Sequence
  Description of Artificial Sequence: Synthetic oligonucleotide
  Target: LAMA2; (+) strand; PAM type: YTN; PAM sequence: CTC
acagtcgatgggaaccaggt

SEQ ID NO: 414369 - DNA, 20 bp, Artificial Sequence
  Description of Artificial Sequence: Synthetic oligonucleotide
  Target: LAMA2; (+) strand; PAM type: YTN; PAM sequence: CTA
catcagctgacacaaatgac

SEQ ID NO: 414370 - DNA, 20 bp, Artificial Sequence
  Description of Artificial Sequence: Synthetic oligonucleotide
  Target: LAMA2; (+) strand; PAM type: YTN; PAM sequence: CTG
acacaaatgaccctgtgttt

SEQ ID NO: 414371 - DNA, 20 bp, Artificial Sequence
  Description of Artificial Sequence: Synthetic oligonucleotide
  Target: LAMA2; (+) strand; PAM type: YTN; PAM sequence: CTG
tgtttgttggaggcttccca

SEQ ID NO: 414372 - DNA, 20 bp, Artificial Sequence
  Description of Artificial Sequence: Synthetic oligonucleotide
  Target: LAMA2; (+) strand; PAM type: YTN; PAM sequence: TTT
gttggaggcttcccaggtga

SEQ ID NO: 414373 - DNA, 20 bp, Artificial Sequence
  Description of Artificial Sequence: Synthetic oligonucleotide
  Target: LAMA2; (+) strand; PAM type: YTN; PAM sequence: TTG
ttggaggcttcccaggtgag

SEQ ID NO: 414374 - DNA, 20 bp, Artificial Sequence
  Description of Artificial Sequence: Synthetic oligonucleotide
  Target: LAMA2; (+) strand; PAM type: YTN; PAM sequence: TTG
gaggcttcccaggtgagtgt

SEQ ID NO: 414375 - DNA, 20 bp, Artificial Sequence
  Description of Artificial Sequence: Synthetic oligonucleotide
  Target: LAMA2; (+) strand; PAM type: YTN; PAM sequence: CTT
cccaggtgagtgttggctac

SEQ ID NO: 414376 - DNA, 20 bp, Artificial Sequence
  Description of Artificial Sequence: Synthetic oligonucleotide
  Target: LAMA2; (+) strand; PAM type: YTN; PAM sequence: TTC
ccaggtgagtgttggctacc

SEQ ID NO: 414377 - DNA, 20 bp, Artificial Sequence
  Description of Artificial Sequence: Synthetic oligonucleotide
  Target: LAMA2; (+) strand; PAM type: YTN; PAM sequence: TTG
gctaccccagcaacaatttc

SEQ ID NO: 414378 - DNA, 20 bp, Artificial Sequence
  Description of Artificial Sequence: Synthetic oligonucleotide
  Target: LAMA2; (+) strand; PAM type: YTN; PAM sequence: CTA
ccccagcaacaatttctttg

SEQ ID NO: 414379 - DNA, 20 bp, Artificial Sequence
  Description of Artificial Sequence: Synthetic oligonucleotide
  Target: LAMA2; (+) strand; PAM type: YTN; PAM sequence: TTT
ctttgctctcttatgttact

SEQ ID NO: 414380 - DNA, 20 bp, Artificial Sequence
  Description of Artificial Sequence: Synthetic oligonucleotide
  Target: LAMA2; (+) strand; PAM type: YTN; PAM sequence: TTC
tttgctctcttatgttactg

SEQ ID NO: 414381 - DNA, 20 bp, Artificial Sequence
  Description of Artificial Sequence: Synthetic oligonucleotide
  Target: LAMA2; (+) strand; PAM type: YTN; PAM sequence: CTT
tgctctcttatgttactggt

SEQ ID NO: 414382 - DNA, 20 bp, Artificial Sequence
  Description of Artificial Sequence: Synthetic oligonucleotide
  Target: LAMA2; (+) strand; PAM type: YTN; PAM sequence: TTT
gctctcttatgttactggtt

SEQ ID NO: 414383 - DNA, 20 bp, Artificial Sequence
  Description of Artificial Sequence: Synthetic oligonucleotide
  Target: LAMA2; (+) strand; PAM type: YTN; PAM sequence: TTG
ctctcttatgttactggttt

SEQ ID NO: 414384 - DNA, 20 bp, Artificial Sequence
  Description of Artificial Sequence: Synthetic oligonucleotide
  Target: LAMA2; (+) strand; PAM type: YTN; PAM sequence: CTC
tcttatgttactggttttga

SEQ ID NO: 414385 - DNA, 20 bp, Artificial Sequence
  Description of Artificial Sequence: Synthetic oligonucleotide
  Target: LAMA2; (+) strand; PAM type: YTN; PAM sequence: CTC
ttatgttactggttttgaaa

SEQ ID NO: 414386 - DNA, 20 bp, Artificial Sequence
  Description of Artificial Sequence: Synthetic oligonucleotide
  Target: LAMA2; (+) strand; PAM type: YTN; PAM sequence: CTT
atgttactggttttgaaaac

SEQ ID NO: 414387 - DNA, 20 bp, Artificial Sequence
  Description of Artificial Sequence: Synthetic oligonucleotide
  Target: LAMA2; (+) strand; PAM type: YTN; PAM sequence: TTA
tgttactggttttgaaaaca

SEQ ID NO: 414388 - DNA, 20 bp, Artificial Sequence
  Description of Artificial Sequence: Synthetic oligonucleotide
  Target: LAMA2; (+) strand; PAM type: YTN; PAM sequence: TTA
ctggttttgaaaacatttat

SEQ ID NO: 414389 - DNA, 20 bp, Artificial Sequence
  Description of Artificial Sequence: Synthetic oligonucleotide
  Target: LAMA2; (+) strand; PAM type: YTN; PAM sequence: CTG
gttttgaaaacatttatatt

SEQ ID NO: 414390 - DNA, 20 bp, Artificial Sequence
  Description of Artificial Sequence: Synthetic oligonucleotide
  Target: LAMA2; (+) strand; PAM type: YTN; PAM sequence: TTT
tgaaaacatttatatttacg

SEQ ID NO: 414391 - DNA, 20 bp, Artificial Sequence
  Description of Artificial Sequence: Synthetic oligonucleotide
  Target: LAMA2; (+) strand; PAM type: YTN; PAM sequence: TTT
gaaaacatttatatttacgt

SEQ ID NO: 414392 - DNA, 20 bp, Artificial Sequence
  Description of Artificial Sequence: Synthetic oligonucleotide
  Target: LAMA2; (+) strand; PAM type: YTN; PAM sequence: TTG
aaaacatttatatttacgtg

SEQ ID NO: 414393 - DNA, 20 bp, Artificial Sequence
  Description of Artificial Sequence: Synthetic oligonucleotide
  Target: LAMA2; (+) strand; PAM type: YTN; PAM sequence: TTT
atatttacgtgtgtctaaga

SEQ ID NO: 414394 - DNA, 20 bp, Artificial Sequence
  Description of Artificial Sequence: Synthetic oligonucleotide
  Target: LAMA2; (+) strand; PAM type: YTN; PAM sequence: TTA
tatttacgtgtgtctaagaa

SEQ ID NO: 414395 - DNA, 20 bp, Artificial Sequence
  Description of Artificial Sequence: Synthetic oligonucleotide
  Target: LAMA2; (+) strand; PAM type: YTN; PAM sequence: TTT
acgtgtgtctaagaatgtgt

SEQ ID NO: 414396 - DNA, 20 bp, Artificial Sequence
  Description of Artificial Sequence: Synthetic oligonucleotide
  Target: LAMA2; (+) strand; PAM type: YTN; PAM sequence: TTA
cgtgtgtctaagaatgtgtg

SEQ ID NO: 414397 - DNA, 20 bp, Artificial Sequence
  Description of Artificial Sequence: Synthetic oligonucleotide
  Target: LAMA2; (+) strand; PAM type: YTN; PAM sequence: CTA
agaatgtgtgcttatgtgta

SEQ ID NO: 414398 - DNA, 20 bp, Artificial Sequence
  Description of Artificial Sequence: Synthetic oligonucleotide
  Target: LAMA2; (+) strand; PAM type: YTN; PAM sequence: CTT
atgtgtacttgcttcctagc

SEQ ID NO: 414399 - DNA, 20 bp, Artificial Sequence
  Description of Artificial Sequence: Synthetic oligonucleotide
  Target: LAMA2; (+) strand; PAM type: YTN; PAM sequence: TTA
tgtgtacttgcttcctagct

SEQ ID NO: 414400 - DNA, 20 bp, Artificial Sequence
  Description of Artificial Sequence: Synthetic oligonucleotide
  Target: LAMA2; (+) strand; PAM type: YTN; PAM sequence: CTT
gcttcctagctttagaatct

SEQ ID NO: 414401 - DNA, 20 bp, Artificial Sequence
  Description of Artificial Sequence: Synthetic oligonucleotide
  Target: LAMA2; (+) strand; PAM type: YTN; PAM sequence: TTG
cttcctagctttagaatctg

SEQ ID NO: 414402 - DNA, 20 bp, Artificial Sequence
  Description of Artificial Sequence: Synthetic oligonucleotide
  Target: LAMA2; (+) strand; PAM type: YTN; PAM sequence: CTT
cctagctttagaatctgctt

SEQ ID NO: 414403 - DNA, 20 bp, Artificial Sequence
  Description of Artificial Sequence: Synthetic oligonucleotide
  Target: LAMA2; (+) strand; PAM type: YTN; PAM sequence: TTC
ctagctttagaatctgctta

SEQ ID NO: 414404 - DNA, 20 bp, Artificial Sequence
  Description of Artificial Sequence: Synthetic oligonucleotide
  Target: LAMA2; (+) strand; PAM type: YTN; PAM sequence: CTA
gctttagaatctgcttagaa

SEQ ID NO: 414405 - DNA, 20 bp, Artificial Sequence
  Description of Artificial Sequence: Synthetic oligonucleotide
  Target: LAMA2; (+) strand; PAM type: YTN; PAM sequence: CTT
tagaatctgcttagaatctg

SEQ ID NO: 414406 - DNA, 20 bp, Artificial Sequence
  Description of Artificial Sequence: Synthetic oligonucleotide
  Target: LAMA2; (+) strand; PAM type: YTN; PAM sequence: TTT
agaatctgcttagaatctgc

SEQ ID NO: 414407 - DNA, 20 bp, Artificial Sequence
  Description of Artificial Sequence: Synthetic oligonucleotide
  Target: LAMA2; (+) strand; PAM type: YTN; PAM sequence: TTA
gaatctgcttagaatctgca

SEQ ID NO: 414408 - DNA, 20 bp, Artificial Sequence
  Description of Artificial Sequence: Synthetic oligonucleotide
  Target: LAMA2; (+) strand; PAM type: YTN; PAM sequence: CTG
cttagaatctgcaccttacc

SEQ ID NO: 414409 - DNA, 20 bp, Artificial Sequence
  Description of Artificial Sequence: Synthetic oligonucleotide
  Target: LAMA2; (+) strand; PAM type: YTN; PAM sequence: CTT
agaatctgcaccttacctaa

SEQ ID NO: 414410 - DNA, 20 bp, Artificial Sequence
  Description of Artificial Sequence: Synthetic oligonucleotide
  Target: LAMA2; (+) strand; PAM type: YTN; PAM sequence: TTA
gaatctgcaccttacctaaa

SEQ ID NO: 414411 - DNA, 20 bp, Artificial Sequence
  Description of Artificial Sequence: Synthetic oligonucleotide
  Target: LAMA2; (+) strand; PAM type: YTN; PAM sequence: CTG
caccttacctaaaatttcca

SEQ ID NO: 414412 - DNA, 20 bp, Artificial Sequence
  Description of Artificial Sequence: Synthetic oligonucleotide
  Target: LAMA2; (+) strand; PAM type: YTN; PAM sequence: CTT
acctaaaatttccagtgtgt

SEQ ID NO: 414413 - DNA, 20 bp, Artificial Sequence
  Description of Artificial Sequence: Synthetic oligonucleotide
  Target: LAMA2; (+) strand; PAM type: YTN; PAM sequence: TTA
cctaaaatttccagtgtgta

SEQ ID NO: 414414 - DNA, 20 bp, Artificial Sequence
  Description of Artificial Sequence: Synthetic oligonucleotide
  Target: LAMA2; (+) strand; PAM type: YTN; PAM sequence: CTA
aaatttccagtgtgtaaaat

SEQ ID NO: 414415 - DNA, 20 bp, Artificial Sequence
  Description of Artificial Sequence: Synthetic oligonucleotide
  Target: LAMA2; (+) strand; PAM type: YTN; PAM sequence: TTT
ccagtgtgtaaaatgaacat

SEQ ID NO: 414416 - DNA, 20 bp, Artificial Sequence
  Description of Artificial Sequence: Synthetic oligonucleotide
  Target: LAMA2; (+) strand; PAM type: YTN; PAM sequence: TTC
cagtgtgtaaaatgaacata

SEQ ID NO: 414417 - DNA, 20 bp, Artificial Sequence
  Description of Artificial Sequence: Synthetic oligonucleotide
  Target: LAMA2; (+) strand; PAM type: YTN; PAM sequence: TTA
cttatataaaccacatggga

SEQ ID NO: 414418 - DNA, 20 bp, Artificial Sequence
  Description of Artificial Sequence: Synthetic oligonucleotide
  Target: LAMA2; (+) strand; PAM type: YTN; PAM sequence: CTT
atataaaccacatgggactg

SEQ ID NO: 414419 - DNA, 20 bp, Artificial Sequence
  Description of Artificial Sequence: Synthetic oligonucleotide
  Target: LAMA2; (+) strand; PAM type: YTN; PAM sequence: TTA
tataaaccacatgggactga

SEQ ID NO: 414420 - DNA, 20 bp, Artificial Sequence
  Description of Artificial Sequence: Synthetic oligonucleotide
  Target: LAMA2; (+) strand; PAM type: YTN; PAM sequence: CTG
aacttttcatgagagccccc

SEQ ID NO: 414421 - DNA, 20 bp, Artificial Sequence
  Description of Artificial Sequence: Synthetic oligonucleotide
  Target: LAMA2; (+) strand; PAM type: YTN; PAM sequence: CTT
ttcatgagagcccccaaagt

SEQ ID NO: 414422 - DNA, 20 bp, Artificial Sequence
  Description of Artificial Sequence: Synthetic oligonucleotide
  Target: LAMA2; (+) strand; PAM type: YTN; PAM sequence: TTT
tcatgagagcccccaaagtt

SEQ ID NO: 414423 - DNA, 20 bp, Artificial Sequence
  Description of Artificial Sequence: Synthetic oligonucleotide
  Target: LAMA2; (+) strand; PAM type: YTN; PAM sequence: TTT
catgagagcccccaaagttt

SEQ ID NO: 414424 - DNA, 20 bp, Artificial Sequence
  Description of Artificial Sequence: Synthetic oligonucleotide
  Target: LAMA2; (+) strand; PAM type: YTN; PAM sequence: TTC
atgagagcccccaaagtttc

SEQ ID NO: 414425 - DNA, 20 bp, Artificial Sequence
  Description of Artificial Sequence: Synthetic oligonucleotide
  Target: LAMA2; (+) strand; PAM type: YTN; PAM sequence: TTT
ccttcgtggagagattgaag

SEQ ID NO: 414426 - DNA, 20 bp, Artificial Sequence
  Description of Artificial Sequence: Synthetic oligonucleotide
  Target: LAMA2; (+) strand; PAM type: YTN; PAM sequence: TTC
cttcgtggagagattgaagc

SEQ ID NO: 414427 - DNA, 20 bp, Artificial Sequence
  Description of Artificial Sequence: Synthetic oligonucleotide
  Target: LAMA2; (+) strand; PAM type: YTN; PAM sequence: CTT
cgtggagagattgaagctgg

SEQ ID NO: 414428 - DNA, 20 bp, Artificial Sequence
  Description of Artificial Sequence: Synthetic oligonucleotide
  Target: LAMA2; (+) strand; PAM type: YTN; PAM sequence: TTC
gtggagagattgaagctgga

SEQ ID NO: 414429 - DNA, 20 bp, Artificial Sequence
  Description of Artificial Sequence: Synthetic oligonucleotide
  Target: LAMA2; (+) strand; PAM type: YTN; PAM sequence: TTG
aagctggaggaaatgaattt

SEQ ID NO: 414430 - DNA, 20 bp, Artificial Sequence
  Description of Artificial Sequence: Synthetic oligonucleotide
  Target: LAMA2; (+) strand; PAM type: YTN; PAM sequence: CTG
gaggaaatgaatttggctta

SEQ ID NO: 414431 - DNA, 20 bp, Artificial Sequence
  Description of Artificial Sequence: Synthetic oligonucleotide
  Target: LAMA2; (+) strand; PAM type: YTN; PAM sequence: TTT
ggcttataaaagatatgagg

SEQ ID NO: 414432 - DNA, 20 bp, Artificial Sequence
  Description of Artificial Sequence: Synthetic oligonucleotide
  Target: LAMA2; (+) strand; PAM type: YTN; PAM sequence: TTG
gcttataaaagatatgaggc

SEQ ID NO: 414433 - DNA, 20 bp, Artificial Sequence
  Description of Artificial Sequence: Synthetic oligonucleotide
  Target: LAMA2; (+) strand; PAM type: YTN; PAM sequence: CTT
ataaaagatatgaggcattt

SEQ ID NO: 414434 - DNA, 20 bp, Artificial Sequence
  Description of Artificial Sequence: Synthetic oligonucleotide
  Target: LAMA2; (+) strand; PAM type: YTN; PAM sequence: TTA
taaaagatatgaggcattta

SEQ ID NO: 414435 - DNA, 20 bp, Artificial Sequence
  Description of Artificial Sequence: Synthetic oligonucleotide
  Target: LAMA2; (+) strand; PAM type: YTN; PAM sequence: TTT
aacagcaattggagccaaac

SEQ ID NO: 414436 - DNA, 20 bp, Artificial Sequence
  Description of Artificial Sequence: Synthetic oligonucleotide
  Target: LAMA2; (+) strand; PAM type: YTN; PAM sequence: TTA
acagcaattggagccaaact

SEQ ID NO: 414437 - DNA, 20 bp, Artificial Sequence
  Description of Artificial Sequence: Synthetic oligonucleotide
  Target: LAMA2; (+) strand; PAM type: YTN; PAM sequence: TTG
gagccaaacttggtgttctt

SEQ ID NO: 414438 - DNA, 20 bp, Artificial Sequence
  Description of Artificial Sequence: Synthetic oligonucleotide
  Target: LAMA2; (+) strand; PAM type: YTN; PAM sequence: CTT
ggtgttctttctgatttttt

SEQ ID NO: 414439 - DNA, 20 bp, Artificial Sequence
  Description of Artificial Sequence: Synthetic oligonucleotide
  Target: LAMA2; (+) strand; PAM type: YTN; PAM sequence: TTG
gtgttctttctgattttttt

SEQ ID NO: 414440 - DNA, 20 bp, Artificial Sequence
  Description of Artificial Sequence: Synthetic oligonucleotide
  Target: LAMA2; (+) strand; PAM type: YTN; PAM sequence: TTC
tttctgatttttttaaaatt

SEQ ID NO: 414441 - DNA, 20 bp, Artificial Sequence
  Description of Artificial Sequence: Synthetic oligonucleotide
  Target: LAMA2; (+) strand; PAM type: YTN; PAM sequence: CTT
tctgatttttttaaaattaa

SEQ ID NO: 414442 - DNA, 20 bp, Artificial Sequence
  Description of Artificial Sequence: Synthetic oligonucleotide
  Target: LAMA2; (+) strand; PAM type: YTN; PAM sequence: TTT
ctgatttttttaaaattaat

SEQ ID NO: 414443 - DNA, 20 bp, Artificial Sequence
  Description of Artificial Sequence: Synthetic oligonucleotide
  Target: LAMA2; (+) strand; PAM type: YTN; PAM sequence: TTC
tgatttttttaaaattaata

SEQ ID NO: 414444 - DNA, 20 bp, Artificial Sequence
  Description of Artificial Sequence: Synthetic oligonucleotide
  Target: LAMA2; (+) strand; PAM type: YTN; PAM sequence: CTG
atttttttaaaattaatata

SEQ ID NO: 414445 - DNA, 20 bp, Artificial Sequence
  Description of Artificial Sequence: Synthetic oligonucleotide
  Target: LAMA2; (+) strand; PAM type: YTN; PAM sequence: TTT
ttttaaaattaatataccag

SEQ ID NO: 414446 - DNA, 20 bp, Artificial Sequence
  Description of Artificial Sequence: Synthetic oligonucleotide
  Target: LAMA2; (+) strand; PAM type: YTN; PAM sequence: TTT
tttaaaattaatataccaga

SEQ ID NO: 414447 - DNA, 20 bp, Artificial Sequence
  Description of Artificial Sequence: Synthetic oligonucleotide
  Target: LAMA2; (+) strand; PAM type: YTN; PAM sequence: TTT
ttaaaattaatataccagag

SEQ ID NO: 414448 - DNA, 20 bp, Artificial Sequence
  Description of Artificial Sequence: Synthetic oligonucleotide
  Target: LAMA2; (+) strand; PAM type: YTN; PAM sequence: TTT
taaaattaatataccagagg

SEQ ID NO: 414449 - DNA, 20 bp, Artificial Sequence
  Description of Artificial Sequence: Synthetic oligonucleotide
  Target: LAMA2; (+) strand; PAM type: YTN; PAM sequence: TTT
aaaattaatataccagagga

SEQ ID NO: 414450 - DNA, 20 bp, Artificial Sequence
  Description of Artificial Sequence: Synthetic oligonucleotide
  Target: LAMA2; (+) strand; PAM type: YTN; PAM sequence: TTA
aaattaatataccagaggaa

SEQ ID NO: 414451 - DNA, 20 bp, Artificial Sequence
  Description of Artificial Sequence: Synthetic oligonucleotide
  Target: LAMA2; (+) strand; PAM type: YTN; PAM sequence: TTA
atataccagaggaatcaatc

SEQ ID NO: 414452 - DNA, 20 bp, Artificial Sequence
  Description of Artificial Sequence: Synthetic oligonucleotide
  Target: LAMA2; (+) strand; PAM type: YTN; PAM sequence: TTA
tggaacttatttcctcaagt

SEQ ID NO: 414453 - DNA, 20 bp, Artificial Sequence
  Description of Artificial Sequence: Synthetic oligonucleotide
  Target: LAMA2; (+) strand; PAM type: YTN; PAM sequence: CTT
atttcctcaagttctggaaa

SEQ ID NO: 414454 - DNA, 20 bp, Artificial Sequence
  Description of Artificial Sequence: Synthetic oligonucleotide
  Target: LAMA2; (+) strand; PAM type: YTN; PAM sequence: TTA
tttcctcaagttctggaaat

SEQ ID NO: 414455 - DNA, 20 bp, Artificial Sequence
  Description of Artificial Sequence: Synthetic oligonucleotide
  Target: LAMA2; (+) strand; PAM type: YTN; PAM sequence: TTT
cctcaagttctggaaatcat

SEQ ID NO: 414456 - DNA, 20 bp, Artificial Sequence
  Description of Artificial Sequence: Synthetic oligonucleotide
  Target: LAMA2; (+) strand; PAM type: YTN; PAM sequence: TTC
ctcaagttctggaaatcatt

SEQ ID NO: 414457 - DNA, 20 bp, Artificial Sequence
  Description of Artificial Sequence: Synthetic oligonucleotide
  Target: LAMA2; (+) strand; PAM type: YTN; PAM sequence: CTC
aagttctggaaatcattggg

SEQ ID NO: 414458 - DNA, 20 bp, Artificial Sequence
  Description of Artificial Sequence: Synthetic oligonucleotide
  Target: LAMA2; (+) strand; PAM type: YTN; PAM sequence: TTC
tggaaatcattgggttaaac

SEQ ID NO: 414459 - DNA, 20 bp, Artificial Sequence
  Description of Artificial Sequence: Synthetic oligonucleotide
  Target: LAMA2; (+) strand; PAM type: YTN; PAM sequence: CTG
gaaatcattgggttaaacat

SEQ ID NO: 414460 - DNA, 20 bp, Artificial Sequence
  Description of Artificial Sequence: Synthetic oligonucleotide
  Target: LAMA2; (+) strand; PAM type: YTN; PAM sequence: TTG
ggttaaacatagctaatttc

SEQ ID NO: 414461 - DNA, 20 bp, Artificial Sequence
  Description of Artificial Sequence: Synthetic oligonucleotide
  Target: LAMA2; (+) strand; PAM type: YTN; PAM sequence: TTA
aacatagctaatttccccct

SEQ ID NO: 414462 - DNA, 20 bp, Artificial Sequence
  Description of Artificial Sequence: Synthetic oligonucleotide
  Target: LAMA2; (+) strand; PAM type: YTN; PAM sequence: CTA
atttcccccttatgttatta

SEQ ID NO: 414463 - DNA, 20 bp, Artificial Sequence
  Description of Artificial Sequence: Synthetic oligonucleotide
  Target: LAMA2; (+) strand; PAM type: YTN; PAM sequence: TTT
cccccttatgttattataga

SEQ ID NO: 414464 - DNA, 20 bp, Artificial Sequence
  Description of Artificial Sequence: Synthetic oligonucleotide
  Target: LAMA2; (+) strand; PAM type: YTN; PAM sequence: TTC
ccccttatgttattatagag

SEQ ID NO: 414465 - DNA, 20 bp, Artificial Sequence
  Description of Artificial Sequence: Synthetic oligonucleotide
  Target: LAMA2; (+) strand; PAM type: YTN; PAM sequence: CTT
atgttattatagagtttata

SEQ ID NO: 414466 - DNA, 20 bp, Artificial Sequence
  Description of Artificial Sequence: Synthetic oligonucleotide
  Target: LAMA2; (+) strand; PAM type: YTN; PAM sequence: TTA
tgttattatagagtttatat

SEQ ID NO: 414467 - DNA, 20 bp, Artificial Sequence
  Description of Artificial Sequence: Synthetic oligonucleotide
  Target: LAMA2; (+) strand; PAM type: YTN; PAM sequence: TTA
ttatagagtttatatttata

SEQ ID NO: 414468 - DNA, 20 bp, Artificial Sequence
  Description of Artificial Sequence: Synthetic oligonucleotide
  Target: LAMA2; (+) strand; PAM type: YTN; PAM sequence: TTA
tagagtttatatttatatta

SEQ ID NO: 414469 - DNA, 20 bp, Artificial Sequence
  Description of Artificial Sequence: Synthetic oligonucleotide
  Target: LAMA2; (+) strand; PAM type: YTN; PAM sequence: TTT
atatttatattacaaagaaa

SEQ ID NO: 414470 - DNA, 20 bp, Artificial Sequence
  Description of Artificial Sequence: Synthetic oligonucleotide
  Target: LAMA2; (+) strand; PAM type: YTN; PAM sequence: TTA
tatttatattacaaagaaac

SEQ ID NO: 414471 - DNA, 20 bp, Artificial Sequence
  Description of Artificial Sequence: Synthetic oligonucleotide
  Target: LAMA2; (+) strand; PAM type: YTN; PAM sequence: TTT
atattacaaagaaacgcaag

SEQ ID NO: 414472 - DNA, 20 bp, Artificial Sequence
  Description of Artificial Sequence: Synthetic oligonucleotide
  Target: LAMA2; (+) strand; PAM type: YTN; PAM sequence: TTA
tattacaaagaaacgcaagc

SEQ ID NO: 414473 - DNA, 20 bp, Artificial Sequence
  Description of Artificial Sequence: Synthetic oligonucleotide
  Target: LAMA2; (+) strand; PAM type: YTN; PAM sequence: TTA
caaagaaacgcaagcaataa

SEQ ID NO: 414474 - DNA, 20 bp, Artificial Sequence
  Description of Artificial Sequence: Synthetic oligonucleotide
  Target: LAMA2; (+) strand; PAM type: YTN; PAM sequence: CTC
attcagaatccttctctagc

SEQ ID NO: 414475 - DNA, 20 bp, Artificial Sequence
  Description of Artificial Sequence: Synthetic oligonucleotide
  Target: LAMA2; (+) strand; PAM type: YTN; PAM sequence: TTC
agaatccttctctagcacat

SEQ ID NO: 414476 - DNA, 20 bp, Artificial Sequence
  Description of Artificial Sequence: Synthetic oligonucleotide
  Target: LAMA2; (+) strand; PAM type: YTN; PAM sequence: CTT
ctctagcacattaaatatag

SEQ ID NO: 414477 - DNA, 20 bp, Artificial Sequence
  Description of Artificial Sequence: Synthetic oligonucleotide
  Target: LAMA2; (+) strand; PAM type: YTN; PAM sequence: TTC
tctagcacattaaatatagc

SEQ ID NO: 414478 - DNA, 20 bp, Artificial Sequence
  Description of Artificial Sequence: Synthetic oligonucleotide
  Target: LAMA2; (+) strand; PAM type: YTN; PAM sequence: CTC
tagcacattaaatatagcat

SEQ ID NO: 414479 - DNA, 20 bp, Artificial Sequence
  Description of Artificial Sequence: Synthetic oligonucleotide
  Target: LAMA2; (+) strand; PAM type: YTN; PAM sequence: CTA
gcacattaaatatagcatgt

SEQ ID NO: 414480 - DNA, 20 bp, Artificial Sequence
  Description of Artificial Sequence: Synthetic oligonucleotide
  Target: LAMA2; (+) strand; PAM type: YTN; PAM sequence: TTA
aatatagcatgtgaactgta

SEQ ID NO: 414481 - DNA, 20 bp, Artificial Sequence
  Description of Artificial Sequence: Synthetic oligonucleotide
  Target: LAMA2; (+) strand; PAM type: YTN; PAM sequence: CTG
tagagatttacctaaagtgc

SEQ ID NO: 414482 - DNA, 20 bp, Artificial Sequence
  Description of Artificial Sequence: Synthetic oligonucleotide
  Target: LAMA2; (+) strand; PAM type: YTN; PAM sequence: TTT
acctaaagtgcccataaaca

SEQ ID NO: 414483 - DNA, 20 bp, Artificial Sequence
  Description of Artificial Sequence: Synthetic oligonucleotide
  Target: LAMA2; (+) strand; PAM type: YTN; PAM sequence: TTA
cctaaagtgcccataaacaa

SEQ ID NO: 414484 - DNA, 20 bp, Artificial Sequence
  Description of Artificial Sequence: Synthetic oligonucleotide
  Target: LAMA2; (+) strand; PAM type: YTN; PAM sequence: CTA
aagtgcccataaacaagagt

SEQ ID NO: 414485 - DNA, 20 bp, Artificial Sequence
  Description of Artificial Sequence: Synthetic oligonucleotide
  Target: LAMA2; (+) strand; PAM type: YTN; PAM sequence: CTT
gatgagaagtaagccaagtg

SEQ ID NO: 414486 - DNA, 20 bp, Artificial Sequence
  Description of Artificial Sequence: Synthetic oligonucleotide
  Target: LAMA2; (+) strand; PAM type: YTN; PAM sequence: TTG
atgagaagtaagccaagtgc

SEQ ID NO: 414487 - DNA, 20 bp, Artificial Sequence
  Description of Artificial Sequence: Synthetic oligonucleotide
  Target: LAMA2; (+) strand; PAM type: YTN; PAM sequence: CTC
ttaataagtactgtaataac

SEQ ID NO: 414488 - DNA, 20 bp, Artificial Sequence
  Description of Artificial Sequence: Synthetic oligonucleotide
  Target: LAMA2; (+) strand; PAM type: YTN; PAM sequence: CTT
aataagtactgtaataacat

SEQ ID NO: 414489 - DNA, 20 bp, Artificial Sequence
  Description of Artificial Sequence: Synthetic oligonucleotide
  Target: LAMA2; (+) strand; PAM type: YTN; PAM sequence: TTA
ataagtactgtaataacata

SEQ ID NO: 414490 - DNA, 20 bp, Artificial Sequence
  Description of Artificial Sequence: Synthetic oligonucleotide
  Target: LAMA2; (+) strand; PAM type: YTN; PAM sequence: CTG
taataacatagcctcctgga

SEQ ID NO: 414491 - DNA, 20 bp, Artificial Sequence
  Description of Artificial Sequence: Synthetic oligonucleotide
  Target: LAMA2; (+) strand; PAM type: YTN; PAM sequence: CTC
ctggaatggtctttcatcat

SEQ ID NO: 414492 - DNA, 20 bp, Artificial Sequence
  Description of Artificial Sequence: Synthetic oligonucleotide
  Target: LAMA2; (+) strand; PAM type: YTN; PAM sequence: CTG
gaatggtctttcatcatttt

SEQ ID NO: 414493 - DNA, 20 bp, Artificial Sequence
  Description of Artificial Sequence: Synthetic oligonucleotide
  Target: LAMA2; (+) strand; PAM type: YTN; PAM sequence: CTT
tcatcattttgtcaagagga

SEQ ID NO: 414494 - DNA, 20 bp, Artificial Sequence
  Description of Artificial Sequence: Synthetic oligonucleotide
  Target: LAMA2; (+) strand; PAM type: YTN; PAM sequence: TTT
catcattttgtcaagaggaa

SEQ ID NO: 414495 - DNA, 20 bp, Artificial Sequence
  Description of Artificial Sequence: Synthetic oligonucleotide
  Target: LAMA2; (+) strand; PAM type: YTN; PAM sequence: TTC
atcattttgtcaagaggaac

SEQ ID NO: 414496 - DNA, 20 bp, Artificial Sequence
  Description of Artificial Sequence: Synthetic oligonucleotide
  Target: LAMA2; (+) strand; PAM type: YTN; PAM sequence: TTT
tgtcaagaggaacttttatc

SEQ ID NO: 414497 - DNA, 20 bp, Artificial Sequence
  Description of Artificial Sequence: Synthetic oligonucleotide
  Target: LAMA2; (+) strand; PAM type: YTN; PAM sequence: TTT
gtcaagaggaacttttatcc

SEQ ID NO: 414498 - DNA, 20 bp, Artificial Sequence
  Description of Artificial Sequence: Synthetic oligonucleotide
  Target: LAMA2; (+) strand; PAM type: YTN; PAM sequence: TTG
tcaagaggaacttttatccc

SEQ ID NO: 414499 - DNA, 20 bp, Artificial Sequence
  Description of Artificial Sequence: Synthetic oligonucleotide
  Target: LAMA2; (+) strand; PAM type: YTN; PAM sequence: CTT
ttatccctgtttatataaag

SEQ ID NO: 414500 - DNA, 20 bp, Artificial Sequence
  Description of Artificial Sequence: Synthetic oligonucleotide
  Target: LAMA2; (+) strand; PAM type: YTN; PAM sequence: TTT
tatccctgtttatataaagc

SEQ ID NO: 414501 - DNA, 20 bp, Artificial Sequence
  Description of Artificial Sequence: Synthetic oligonucleotide
  Target: LAMA2; (+) strand; PAM type: YTN; PAM sequence: TTT
atccctgtttatataaagct

SEQ ID NO: 414502 - DNA, 20 bp, Artificial Sequence
  Description of Artificial Sequence: Synthetic oligonucleotide
  Target: LAMA2; (+) strand; PAM type: YTN; PAM sequence: TTA
tccctgtttatataaagctc

SEQ ID NO: 414503 - DNA, 20 bp, Artificial Sequence
  Description of Artificial Sequence: Synthetic oligonucleotide
  Target: LAMA2; (+) strand; PAM type: YTN; PAM sequence: CTG
tttatataaagctcctttgc

SEQ ID NO: 414504 - DNA, 20 bp, Artificial Sequence
  Description of Artificial Sequence: Synthetic oligonucleotide
  Target: LAMA2; (+) strand; PAM type: YTN; PAM sequence: TTT
atataaagctcctttgctaa

SEQ ID NO: 414505 - DNA, 20 bp, Artificial Sequence
  Description of Artificial Sequence: Synthetic oligonucleotide
  Target: LAMA2; (+) strand; PAM type: YTN; PAM sequence: TTA
tataaagctcctttgctaaa

SEQ ID NO: 414506 - DNA, 20 bp, Artificial Sequence
  Description of Artificial Sequence: Synthetic oligonucleotide
  Target: LAMA2; (+) strand; PAM type: YTN; PAM sequence: CTC
ctttgctaaatgaaacaagc

SEQ ID NO: 414507 - DNA, 20 bp, Artificial Sequence
  Description of Artificial Sequence: Synthetic oligonucleotide
  Target: LAMA2; (+) strand; PAM type: YTN; PAM sequence: CTT
tgctaaatgaaacaagcaaa

SEQ ID NO: 414508 - DNA, 20 bp, Artificial Sequence
  Description of Artificial Sequence: Synthetic oligonucleotide
  Target: LAMA2; (+) strand; PAM type: YTN; PAM sequence: TTT
gctaaatgaaacaagcaaaa

SEQ ID NO: 414509 - DNA, 20 bp, Artificial Sequence
  Description of Artificial Sequence: Synthetic oligonucleotide
  Target: LAMA2; (+) strand; PAM type: YTN; PAM sequence: TTG
ctaaatgaaacaagcaaaat

SEQ ID NO: 414510 - DNA, 20 bp, Artificial Sequence
  Description of Artificial Sequence: Synthetic oligonucleotide
  Target: LAMA2; (+) strand; PAM type: YTN; PAM sequence: CTA
aatgaaacaagcaaaatgta

SEQ ID NO: 414511 - DNA, 20 bp, Artificial Sequence
  Description of Artificial Sequence: Synthetic oligonucleotide
  Target: LAMA2; (+) strand; PAM type: YTN; PAM sequence: TTC
agcaattgttgacagagcaa

SEQ ID NO: 414512 - DNA, 20 bp, Artificial Sequence
  Description of Artificial Sequence: Synthetic oligonucleotide
  Target: LAMA2; (+) strand; PAM type: YTN; PAM sequence: TTG
ttgacagagcaatgttgata

SEQ ID NO: 414513 - DNA, 20 bp, Artificial Sequence
  Description of Artificial Sequence: Synthetic oligonucleotide
  Target: LAMA2; (+) strand; PAM type: YTN; PAM sequence: TTG
acagagcaatgttgatagaa

SEQ ID NO: 414514 - DNA, 20 bp, Artificial Sequence
  Description of Artificial Sequence: Synthetic oligonucleotide
  Target: LAMA2; (+) strand; PAM type: YTN; PAM sequence: TTG
atagaaatgcaatgggggcc

SEQ ID NO: 414515 - DNA, 20 bp, Artificial Sequence
  Description of Artificial Sequence: Synthetic oligonucleotide
  Target: LAMA2; (+) strand; PAM type: YTN; PAM sequence: CTC
ctctttccaaagtggcttct

SEQ ID NO: 414516 - DNA, 20 bp, Artificial Sequence
  Description of Artificial Sequence: Synthetic oligonucleotide
  Target: LAMA2; (+) strand; PAM type: YTN; PAM sequence: CTC
tttccaaagtggcttctgtg

SEQ ID NO: 414517 - DNA, 20 bp, Artificial Sequence
  Description of Artificial Sequence: Synthetic oligonucleotide
  Target: LAMA2; (+) strand; PAM type: YTN; PAM sequence: CTT
tccaaagtggcttctgtgtt

SEQ ID NO: 414518 - DNA, 20 bp, Artificial Sequence
  Description of Artificial Sequence: Synthetic oligonucleotide
  Target: LAMA2; (+) strand; PAM type: YTN; PAM sequence: TTT
ccaaagtggcttctgtgttt

SEQ ID NO: 414519 - DNA, 20 bp, Artificial Sequence
  Description of Artificial Sequence: Synthetic oligonucleotide
  Target: LAMA2; (+) strand; PAM type: YTN; PAM sequence: TTC
caaagtggcttctgtgtttt

SEQ ID NO: 414520 - DNA, 20 bp, Artificial Sequence
  Description of Artificial Sequence: Synthetic oligonucleotide
  Target: LAMA2; (+) strand; PAM type: YTN; PAM sequence: CTT
ctgtgttttaaaaagatctt

SEQ ID NO: 414521 - DNA, 20 bp, Artificial Sequence
  Description of Artificial Sequence: Synthetic oligonucleotide
  Target: LAMA2; (+) strand; PAM type: YTN; PAM sequence: TTC
tgtgttttaaaaagatcttt

SEQ ID NO: 414522 - DNA, 20 bp, Artificial Sequence
  Description of Artificial Sequence: Synthetic oligonucleotide
  Target: LAMA2; (+) strand; PAM type: YTN; PAM sequence: CTG
tgttttaaaaagatcttttg

SEQ ID NO: 414523 - DNA, 20 bp, Artificial Sequence
  Description of Artificial Sequence: Synthetic oligonucleotide
  Target: LAMA2; (+) strand; PAM type: YTN; PAM sequence: TTT
taaaaagatcttttgcttca

SEQ ID NO: 414524 - DNA, 20 bp, Artificial Sequence
  Description of Artificial Sequence: Synthetic oligonucleotide
  Target: LAMA2; (+) strand; PAM type: YTN; PAM sequence: TTT
aaaaagatcttttgcttcaa

SEQ ID NO: 414525 - DNA, 20 bp, Artificial Sequence
  Description of Artificial Sequence: Synthetic oligonucleotide
  Target: LAMA2; (+) strand; PAM type: YTN; PAM sequence: TTA
aaaagatcttttgcttcaat

SEQ ID NO: 414526 - DNA, 20 bp, Artificial Sequence
  Description of Artificial Sequence: Synthetic oligonucleotide
  Target: LAMA2; (+) strand; PAM type: YTN; PAM sequence: CTT
ttgcttcaatcaggataaat

SEQ ID NO: 414527 - DNA, 20 bp, Artificial Sequence
  Description of Artificial Sequence: Synthetic oligonucleotide
  Target: LAMA2; (+) strand; PAM type: YTN; PAM sequence: TTT
tgcttcaatcaggataaatt

SEQ ID NO: 414528 - DNA, 20 bp, Artificial Sequence
  Description of Artificial Sequence: Synthetic oligonucleotide
  Target: LAMA2; (+) strand; PAM type: YTN; PAM sequence: TTT
gcttcaatcaggataaattc

SEQ ID NO: 414529 - DNA, 20 bp, Artificial Sequence
  Description of Artificial Sequence: Synthetic oligonucleotide
  Target: LAMA2; (+) strand; PAM type: YTN; PAM sequence: TTG
cttcaatcaggataaattcc

SEQ ID NO: 414530 - DNA, 20 bp, Artificial Sequence
  Description of Artificial Sequence: Synthetic oligonucleotide
  Target: LAMA2; (+) strand; PAM type: YTN; PAM sequence: CTT
caatcaggataaattccaag

SEQ ID NO: 414531 - DNA, 20 bp, Artificial Sequence
  Description of Artificial Sequence: Synthetic oligonucleotide
  Target: LAMA2; (+) strand; PAM type: YTN; PAM sequence: TTC
aatcaggataaattccaaga

SEQ ID NO: 414532 - DNA, 20 bp, Artificial Sequence
  Description of Artificial Sequence: Synthetic oligonucleotide
  Target: LAMA2; (+) strand; PAM type: YTN; PAM sequence: TTC
caagatattatgaaggaggt

SEQ ID NO: 414533 - DNA, 20 bp, Artificial Sequence
  Description of Artificial Sequence: Synthetic oligonucleotide
  Target: LAMA2; (+) strand; PAM type: YTN; PAM sequence: TTA
tgaaggaggtaatgtacttc

SEQ ID NO: 414534 - DNA, 20 bp, Artificial Sequence
  Description of Artificial Sequence: Synthetic oligonucleotide
  Target: LAMA2; (+) strand; PAM type: YTN; PAM sequence: CTT
ctccattcagtctatgataa

SEQ ID NO: 414535 - DNA, 20 bp, Artificial Sequence
  Description of Artificial Sequence: Synthetic oligonucleotide
  Target: LAMA2; (+) strand; PAM type: YTN; PAM sequence: TTC
tccattcagtctatgataat

SEQ ID NO: 414536 - DNA, 20 bp, Artificial Sequence
  Description of Artificial Sequence: Synthetic oligonucleotide
  Target: LAMA2; (+) strand; PAM type: YTN; PAM sequence: CTC
cattcagtctatgataatgg

SEQ ID NO: 414537 - DNA, 20 bp, Artificial Sequence
  Description of Artificial Sequence: Synthetic oligonucleotide
  Target: LAMA2; (+) strand; PAM type: YTN; PAM sequence: TTC
agtctatgataatgggatcc

SEQ ID NO: 414538 - DNA, 20 bp, Artificial Sequence
  Description of Artificial Sequence: Synthetic oligonucleotide
  Target: LAMA2; (+) strand; PAM type: YTN; PAM sequence: CTA
tgataatgggatcctaatta

SEQ ID NO: 414539 - DNA, 20 bp, Artificial Sequence
  Description of Artificial Sequence: Synthetic oligonucleotide
  Target: LAMA2; (+) strand; PAM type: YTN; PAM sequence: CTA
attaacacctagtaggccta

SEQ ID NO: 414540 - DNA, 20 bp, Artificial Sequence
  Description of Artificial Sequence: Synthetic oligonucleotide
  Target: LAMA2; (+) strand; PAM type: YTN; PAM sequence: TTA
acacctagtaggcctactga

SEQ ID NO: 414541 - DNA, 20 bp, Artificial Sequence
  Description of Artificial Sequence: Synthetic oligonucleotide
  Target: LAMA2; (+) strand; PAM type: YTN; PAM sequence: CTA
gtaggcctactgaaacaagc

SEQ ID NO: 414542 - DNA, 20 bp, Artificial Sequence
  Description of Artificial Sequence: Synthetic oligonucleotide
  Target: LAMA2; (+) strand; PAM type: YTN; PAM sequence: CTA
ctgaaacaagcacctctata

SEQ ID NO: 414543 - DNA, 20 bp, Artificial Sequence
  Description of Artificial Sequence: Synthetic oligonucleotide
  Target: LAMA2; (+) strand; PAM type: YTN; PAM sequence: CTG
aaacaagcacctctataata

SEQ ID NO: 414544 - DNA, 20 bp, Artificial Sequence
  Description of Artificial Sequence: Synthetic oligonucleotide
  Target: LAMA2; (+) strand; PAM type: YTN; PAM sequence: CTC
tataataagaggaagattct

SEQ ID NO: 414545 - DNA, 20 bp, Artificial Sequence
  Description of Artificial Sequence: Synthetic oligonucleotide
  Target: LAMA2; (+) strand; PAM type: YTN; PAM sequence: CTA
taataagaggaagattctac

SEQ ID NO: 414546 - DNA, 20 bp, Artificial Sequence
  Description of Artificial Sequence: Synthetic oligonucleotide
  Target: LAMA2; (+) strand; PAM type: YTN; PAM sequence: TTC
tacatgaatatccaacctac

SEQ ID NO: 414547 - DNA, 20 bp, Artificial Sequence
  Description of Artificial Sequence: Synthetic oligonucleotide
  Target: LAMA2; (+) strand; PAM type: YTN; PAM sequence: CTA
catgaatatccaacctactt

SEQ ID NO: 414548 - DNA, 20 bp, Artificial Sequence
  Description of Artificial Sequence: Synthetic oligonucleotide
  Target: LAMA2; (+) strand; PAM type: YTN; PAM sequence: CTA
cttaacctttagggatttat

SEQ ID NO: 414549 - DNA, 20 bp, Artificial Sequence
  Description of Artificial Sequence: Synthetic oligonucleotide
  Target: LAMA2; (+) strand; PAM type: YTN; PAM sequence: CTT
aacctttagggatttatttt

SEQ ID NO: 414550 - DNA, 20 bp, Artificial Sequence
  Description of Artificial Sequence: Synthetic oligonucleotide
  Target: LAMA2; (+) strand; PAM type: YTN; PAM sequence: TTA
acctttagggatttattttt

SEQ ID NO: 414551 - DNA, 20 bp, Artificial Sequence
  Description of Artificial Sequence: Synthetic oligonucleotide
  Target: LAMA2; (+) strand; PAM type: YTN; PAM sequence: CTT
tagggatttatttttacaat

SEQ ID NO: 414552 - DNA, 20 bp, Artificial Sequence
  Description of Artificial Sequence: Synthetic oligonucleotide
  Target: LAMA2; (+) strand; PAM type: YTN; PAM sequence: TTT
agggatttatttttacaatg

SEQ ID NO: 414553 - DNA, 20 bp, Artificial Sequence
  Description of Artificial Sequence: Synthetic oligonucleotide
  Target: LAMA2; (+) strand; PAM type: YTN; PAM sequence: TTA
gggatttatttttacaatgt

SEQ ID NO: 414554 - DNA, 20 bp, Artificial Sequence
  Description of Artificial Sequence: Synthetic oligonucleotide
  Target: LAMA2; (+) strand; PAM type: YTN; PAM sequence: TTT
atttttacaatgtaagaaag

SEQ ID NO: 414555 - DNA, 20 bp, Artificial Sequence
  Description of Artificial Sequence: Synthetic oligonucleotide
  Target: LAMA2; (+) strand; PAM type: YTN; PAM sequence: TTA
tttttacaatgtaagaaagt

SEQ ID NO: 414556 - DNA, 20 bp, Artificial Sequence
  Description of Artificial Sequence: Synthetic oligonucleotide
  Target: LAMA2; (+) strand; PAM type: YTN; PAM sequence: TTT
ttacaatgtaagaaagtgat

SEQ ID NO: 414557 - DNA, 20 bp, Artificial Sequence
  Description of Artificial Sequence: Synthetic oligonucleotide
  Target: LAMA2; (+) strand; PAM type: YTN; PAM sequence: TTT
tacaatgtaagaaagtgata

SEQ ID NO: 414558 - DNA, 20 bp, Artificial Sequence
  Description of Artificial Sequence: Synthetic oligonucleotide
  Target: LAMA2; (+) strand; PAM type: YTN; PAM sequence: TTT
acaatgtaagaaagtgataa

SEQ ID NO: 414559 - DNA, 20 bp, Artificial Sequence
  Description of Artificial Sequence: Synthetic oligonucleotide
  Target: LAMA2; (+) strand; PAM type: YTN; PAM sequence: TTA
caatgtaagaaagtgataaa

SEQ ID NO: 414560 - DNA, 20 bp, Artificial Sequence
  Description of Artificial Sequence: Synthetic oligonucleotide
  Target: LAMA2; (+) strand; PAM type: YTN; PAM sequence: CTT
caaaaagttctaagtaagtc

SEQ ID NO: 414561 - DNA, 20 bp, Artificial Sequence
  Description of Artificial Sequence: Synthetic oligonucleotide
  Target: LAMA2; (+) strand; PAM type: YTN; PAM sequence: TTC
aaaaagttctaagtaagtca

SEQ ID NO: 414562 - DNA, 20 bp, Artificial Sequence
  Description of Artificial Sequence: Synthetic oligonucleotide
  Target: LAMA2; (+) strand; PAM type: YTN; PAM sequence: TTC
taagtaagtcagtacttaaa

SEQ ID NO: 414563 - DNA, 20 bp, Artificial Sequence
  Description of Artificial Sequence: Synthetic oligonucleotide
  Target: LAMA2; (+) strand; PAM type: YTN; PAM sequence: CTA
agtaagtcagtacttaaaag

SEQ ID NO: 414564 - DNA, 20 bp, Artificial Sequence
  Description of Artificial Sequence: Synthetic oligonucleotide
  Target: LAMA2; (+) strand; PAM type: YTN; PAM sequence: CTT
aaaagtatttgatcaattgc

SEQ ID NO: 414565 - DNA, 20 bp, Artificial Sequence
  Description of Artificial Sequence: Synthetic oligonucleotide
  Target: LAMA2; (+) strand; PAM type: YTN; PAM sequence: TTA
aaagtatttgatcaattgct

SEQ ID NO: 414566 - DNA, 20 bp, Artificial Sequence
  Description of Artificial Sequence: Synthetic oligonucleotide
  Target: LAMA2; (+) strand; PAM type: YTN; PAM sequence: TTT
gatcaattgctttgtttcat

SEQ ID NO: 414567 - DNA, 20 bp, Artificial Sequence
  Description of Artificial Sequence: Synthetic oligonucleotide
  Target: LAMA2; (+) strand; PAM type: YTN; PAM sequence: TTG
atcaattgctttgtttcatg

SEQ ID NO: 414568 - DNA, 20 bp, Artificial Sequence
  Description of Artificial Sequence: Synthetic oligonucleotide
  Target: LAMA2; (+) strand; PAM type: YTN; PAM sequence: TTG
ctttgtttcatgaagtaaca

SEQ ID NO: 414569 - DNA, 20 bp, Artificial Sequence
  Description of Artificial Sequence: Synthetic oligonucleotide
  Target: LAMA2; (+) strand; PAM type: YTN; PAM sequence: CTT
tgtttcatgaagtaacattt

SEQ ID NO: 414570 - DNA, 20 bp, Artificial Sequence
  Description of Artificial Sequence: Synthetic oligonucleotide
  Target: LAMA2; (+) strand; PAM type: YTN; PAM sequence: TTT
gtttcatgaagtaacatttt

SEQ ID NO: 414571 - DNA, 20 bp, Artificial Sequence
  Description of Artificial Sequence: Synthetic oligonucleotide
  Target: LAMA2; (+) strand; PAM type: YTN; PAM sequence: TTG
tttcatgaagtaacatttta

SEQ ID NO: 414572 - DNA, 20 bp, Artificial Sequence
  Description of Artificial Sequence: Synthetic oligonucleotide
  Target: LAMA2; (+) strand; PAM type: YTN; PAM sequence: TTT
catgaagtaacattttacaa

SEQ ID NO: 414573 - DNA, 20 bp, Artificial Sequence
  Description of Artificial Sequence: Synthetic oligonucleotide
  Target: LAMA2; (+) strand; PAM type: YTN; PAM sequence: TTC
atgaagtaacattttacaat

SEQ ID NO: 414574 - DNA, 20 bp, Artificial Sequence
  Description of Artificial Sequence: Synthetic oligonucleotide
  Target: LAMA2; (+) strand; PAM type: YTN; PAM sequence: TTT
tacaattttaagtcacaact

SEQ ID NO: 414575 - DNA, 20 bp, Artificial Sequence
  Description of Artificial Sequence: Synthetic oligonucleotide
  Target: LAMA2; (+) strand; PAM type: YTN; PAM sequence: TTT
acaattttaagtcacaacta

SEQ ID NO: 414576 - DNA, 20 bp, Artificial Sequence
  Description of Artificial Sequence: Synthetic oligonucleotide
  Target: LAMA2; (+) strand; PAM type: YTN; PAM sequence: TTA
caattttaagtcacaactat

SEQ ID NO: 414577 - DNA, 20 bp, Artificial Sequence
  Description of Artificial Sequence: Synthetic oligonucleotide
  Target: LAMA2; (+) strand; PAM type: YTN; PAM sequence: TTT
taagtcacaactataaattt

SEQ ID NO: 414578 - DNA, 20 bp, Artificial Sequence
  Description of Artificial Sequence: Synthetic oligonucleotide
  Target: LAMA2; (+) strand; PAM type: YTN; PAM sequence: TTT
aagtcacaactataaatttg

SEQ ID NO: 414579 - DNA, 20 bp, Artificial Sequence
  Description of Artificial Sequence: Synthetic oligonucleotide
  Target: LAMA2; (+) strand; PAM type: YTN; PAM sequence: TTA
agtcacaactataaatttgt

SEQ ID NO: 414580 - DNA, 20 bp, Artificial Sequence
  Description of Artificial Sequence: Synthetic oligonucleotide
  Target: LAMA2; (+) strand; PAM type: YTN; PAM sequence: CTA
taaatttgttcatcccaaac

SEQ ID NO: 414581 - DNA, 20 bp, Artificial Sequence
  Description of Artificial Sequence: Synthetic oligonucleotide
  Target: LAMA2; (+) strand; PAM type: YTN; PAM sequence: TTT
gttcatcccaaaccaagtta

SEQ ID NO: 414582 - DNA, 20 bp, Artificial Sequence
  Description of Artificial Sequence: Synthetic oligonucleotide
  Target: LAMA2; (+) strand; PAM type: YTN; PAM sequence: TTG
ttcatcccaaaccaagttat

SEQ ID NO: 414583 - DNA, 20 bp, Artificial Sequence
  Description of Artificial Sequence: Synthetic oligonucleotide
  Target: LAMA2; (+) strand; PAM type: YTN; PAM sequence: TTC
atcccaaaccaagttatttc

SEQ ID NO: 414584 - DNA, 20 bp, Artificial Sequence
  Description of Artificial Sequence: Synthetic oligonucleotide
  Target: LAMA2; (+) strand; PAM type: YTN; PAM sequence: TTA
tttcatgtcttaagatgtat

SEQ ID NO: 414585 - DNA, 20 bp, Artificial Sequence
  Description of Artificial Sequence: Synthetic oligonucleotide
  Target: LAMA2; (+) strand; PAM type: YTN; PAM sequence: TTT
catgtcttaagatgtataat

SEQ ID NO: 414586 - DNA, 20 bp, Artificial Sequence
  Description of Artificial Sequence: Synthetic oligonucleotide
  Target: LAMA2; (+) strand; PAM type: YTN; PAM sequence: TTC
atgtcttaagatgtataatt

SEQ ID NO: 414587 - DNA, 20 bp, Artificial Sequence
  Description of Artificial Sequence: Synthetic oligonucleotide
  Target: LAMA2; (+) strand; PAM type: YTN; PAM sequence: CTT
aagatgtataattctagatg

SEQ ID NO: 414588 - DNA, 20 bp, Artificial Sequence
  Description of Artificial Sequence: Synthetic oligonucleotide
  Target: LAMA2; (+) strand; PAM type: YTN; PAM sequence: TTA
agatgtataattctagatgt

SEQ ID NO: 414589 - DNA, 20 bp, Artificial Sequence
  Description of Artificial Sequence: Synthetic oligonucleotide
  Target: LAMA2; (+) strand; PAM type: YTN; PAM sequence: TTC
tagatgttttcatatgttat

SEQ ID NO: 414590 - DNA, 20 bp, Artificial Sequence
  Description of Artificial Sequence: Synthetic oligonucleotide
  Target: LAMA2; (+) strand; PAM type: YTN; PAM sequence: CTA
gatgttttcatatgttataa

SEQ ID NO: 414591 - DNA, 20 bp, Artificial Sequence
  Description of Artificial Sequence: Synthetic oligonucleotide
  Target: LAMA2; (+) strand; PAM type: YTN; PAM sequence: TTT
tcatatgttataactattaa

SEQ ID NO: 414592 - DNA, 20 bp, Artificial Sequence
  Description of Artificial Sequence: Synthetic oligonucleotide
  Target: LAMA2; (+) strand; PAM type: YTN; PAM sequence: TTT
catatgttataactattaaa

SEQ ID NO: 414593 - DNA, 20 bp, Artificial Sequence
  Description of Artificial Sequence: Synthetic oligonucleotide
  Target: LAMA2; (+) strand; PAM type: YTN; PAM sequence: TTC
atatgttataactattaaaa

SEQ ID NO: 414594 - DNA, 20 bp, Artificial Sequence
  Description of Artificial Sequence: Synthetic oligonucleotide
  Target: LAMA2; (+) strand; PAM type: YTN; PAM sequence: TTA
taactattaaaaagttgagg

SEQ ID NO: 414595 - DNA, 20 bp, Artificial Sequence
  Description of Artificial Sequence: Synthetic oligonucleotide
  Target: LAMA2; (+) strand; PAM type: YTN; PAM sequence: CTA
ttaaaaagttgaggctggac

SEQ ID NO: 414596 - DNA, 20 bp, Artificial Sequence
  Description of Artificial Sequence: Synthetic oligonucleotide
  Target: LAMA2; (+) strand; PAM type: YTN; PAM sequence: TTA
aaaagttgaggctggacatg

SEQ ID NO: 414597 - DNA, 20 bp, Artificial Sequence
  Description of Artificial Sequence: Synthetic oligonucleotide
  Target: LAMA2; (+) strand; PAM type: YTN; PAM sequence: TTG
aggctggacatggtggctca

SEQ ID NO: 414598 - DNA, 20 bp, Artificial Sequence
  Description of Artificial Sequence: Synthetic oligonucleotide
  Target: LAMA2; (+) strand; PAM type: YTN; PAM sequence: CTG
gacatggtggctcatgcctg

SEQ ID NO: 414599 - DNA, 20 bp, Artificial Sequence
  Description of Artificial Sequence: Synthetic oligonucleotide
  Target: LAMA2; (+) strand; PAM type: YTN; PAM sequence: CTC
atgcctgtaatcccaacact

SEQ ID NO: 414600 - DNA, 20 bp, Artificial Sequence
  Description of Artificial Sequence: Synthetic oligonucleotide
  Target: LAMA2; (+) strand; PAM type: YTN; PAM sequence: CTG
taatcccaacactttggaat

SEQ ID NO: 414601 - DNA, 20 bp, Artificial Sequence
  Description of Artificial Sequence: Synthetic oligonucleotide
  Target: LAMA2; (+) strand; PAM type: YTN; PAM sequence: CTT
tggaattacactttgggcat

SEQ ID NO: 414602 - DNA, 20 bp, Artificial Sequence
  Description of Artificial Sequence: Synthetic oligonucleotide
  Target: LAMA2; (+) strand; PAM type: YTN; PAM sequence: TTT
ggaattacactttgggcata

SEQ ID NO: 414603 - DNA, 20 bp, Artificial Sequence
  Description of Artificial Sequence: Synthetic oligonucleotide
  Target: LAMA2; (+) strand; PAM type: YTN; PAM sequence: TTG
gaattacactttgggcatag

SEQ ID NO: 414604 - DNA, 20 bp, Artificial Sequence
  Description of Artificial Sequence: Synthetic oligonucleotide
  Target: LAMA2; (+) strand; PAM type: YTN; PAM sequence: TTA
cactttgggcatagatgggg

SEQ ID NO: 414605 - DNA, 20 bp, Artificial Sequence
  Description of Artificial Sequence: Synthetic oligonucleotide
  Target: LAMA2; (+) strand; PAM type: YTN; PAM sequence: CTT
tgggcatagatggggagatc

SEQ ID NO: 414606 - DNA, 20 bp, Artificial Sequence
  Description of Artificial Sequence: Synthetic oligonucleotide
  Target: LAMA2; (+) strand; PAM type: YTN; PAM sequence: TTT
gggcatagatggggagatct

SEQ ID NO: 414607 - DNA, 20 bp, Artificial Sequence
  Description of Artificial Sequence: Synthetic oligonucleotide
  Target: LAMA2; (+) strand; PAM type: YTN; PAM sequence: TTG
ggcatagatggggagatctc

SEQ ID NO: 414608 - DNA, 20 bp, Artificial Sequence
  Description of Artificial Sequence: Synthetic oligonucleotide
  Target: LAMA2; (+) strand; PAM type: YTN; PAM sequence: CTC
ttgagcccaggagttggaga

SEQ ID NO: 414609 - DNA, 20 bp, Artificial Sequence
  Description of Artificial Sequence: Synthetic oligonucleotide
  Target: LAMA2; (+) strand; PAM type: YTN; PAM sequence: CTT
gagcccaggagttggagagc

SEQ ID NO: 414610 - DNA, 20 bp, Artificial Sequence
  Description of Artificial Sequence: Synthetic oligonucleotide
  Target: LAMA2; (+) strand; PAM type: YTN; PAM sequence: TTG
agcccaggagttggagagca

SEQ ID NO: 414611 - DNA, 20 bp, Artificial Sequence
  Description of Artificial Sequence: Synthetic oligonucleotide
  Target: LAMA2; (+) strand; PAM type: YTN; PAM sequence: TTG
gagagcagcctgggcaacac

SEQ ID NO: 414612 - DNA, 20 bp, Artificial Sequence
  Description of Artificial Sequence: Synthetic oligonucleotide
  Target: LAMA2; (+) strand; PAM type: YTN; PAM sequence: CTG
ggcaacacggcgaagggagg

SEQ ID NO: 414613 - DNA, 20 bp, Artificial Sequence
  Description of Artificial Sequence: Synthetic oligonucleotide
  Target: LAMA2; (+) strand; PAM type: YTN; PAM sequence: CTT
gagcccaggaggttgaggct

SEQ ID NO: 414614 - DNA, 20 bp, Artificial Sequence
  Description of Artificial Sequence: Synthetic oligonucleotide
  Target: LAMA2; (+) strand; PAM type: YTN; PAM sequence: TTG
agcccaggaggttgaggctg

SEQ ID NO: 414615 - DNA, 20 bp, Artificial Sequence
  Description of Artificial Sequence: Synthetic oligonucleotide
  Target: LAMA2; (+) strand; PAM type: YTN; PAM sequence: TTG
aggctgcagtaagccttgat

SEQ ID NO: 414616 - DNA, 20 bp, Artificial Sequence
  Description of Artificial Sequence: Synthetic oligonucleotide
  Target: LAMA2; (+) strand; PAM type: YTN; PAM sequence: CTG
cagtaagccttgattgcgcc

SEQ ID NO: 414617 - DNA, 20 bp, Artificial Sequence
  Description of Artificial Sequence: Synthetic oligonucleotide
  Target: LAMA2; (+) strand; PAM type: YTN; PAM sequence: CTT
gattgcgccattgcactcca

SEQ ID NO: 414618 - DNA, 20 bp, Artificial Sequence
  Description of Artificial Sequence: Synthetic oligonucleotide
  Target: LAMA2; (+) strand; PAM type: YTN; PAM sequence: TTG
attgcgccattgcactccag

SEQ ID NO: 414619 - DNA, 20 bp, Artificial Sequence
  Description of Artificial Sequence: Synthetic oligonucleotide
  Target: LAMA2; (+) strand; PAM type: YTN; PAM sequence: TTG
cgccattgcactccagcctg

SEQ ID NO: 414620 - DNA, 20 bp, Artificial Sequence
  Description of Artificial Sequence: Synthetic oligonucleotide
  Target: LAMA2; (+) strand; PAM type: YTN; PAM sequence: TTG
cactccagcctgggcaacag

SEQ ID NO: 414621 - DNA, 20 bp, Artificial Sequence
  Description of Artificial Sequence: Synthetic oligonucleotide
  Target: LAMA2; (+) strand; PAM type: YTN; PAM sequence: CTC
cagcctgggcaacagagcaa

SEQ ID NO: 414622 - DNA, 20 bp, Artificial Sequence
  Description of Artificial Sequence: Synthetic oligonucleotide
  Target: LAMA2; (+) strand; PAM type: YTN; PAM sequence: CTG
ggcaacagagcaagaacctg

SEQ ID NO: 414623 - DNA, 20 bp, Artificial Sequence
  Description of Artificial Sequence: Synthetic oligonucleotide
  Target: LAMA2; (+) strand; PAM type: YTN; PAM sequence: CTG
tctcaaaaaattttaagttg

SEQ ID NO: 414624 - DNA, 20 bp, Artificial Sequence
  Description of Artificial Sequence: Synthetic oligonucleotide
  Target: LAMA2; (+) strand; PAM type: YTN; PAM sequence: CTC
aaaaaattttaagttgatct

SEQ ID NO: 414625 - DNA, 20 bp, Artificial Sequence
  Description of Artificial Sequence: Synthetic oligonucleotide
  Target: LAMA2; (+) strand; PAM type: YTN; PAM sequence: TTT
taagttgatctttctttctc

SEQ ID NO: 414626 - DNA, 20 bp, Artificial Sequence
  Description of Artificial Sequence: Synthetic oligonucleotide
  Target: LAMA2; (+) strand; PAM type: YTN; PAM sequence: TTT
aagttgatctttctttctct

SEQ ID NO: 414627 - DNA, 20 bp, Artificial Sequence
  Description of Artificial Sequence: Synthetic oligonucleotide
  Target: LAMA2; (+) strand; PAM type: YTN; PAM sequence: TTA
agttgatctttctttctcta

SEQ ID NO: 414628 - DNA, 20 bp, Artificial Sequence
  Description of Artificial Sequence: Synthetic oligonucleotide
  Target: LAMA2; (+) strand; PAM type: YTN; PAM sequence: TTG
atctttctttctctacaatt

SEQ ID NO: 414629 - DNA, 20 bp, Artificial Sequence
  Description of Artificial Sequence: Synthetic oligonucleotide
  Target: LAMA2; (+) strand; PAM type: YTN; PAM sequence: CTT
tctttctctacaattctatt

SEQ ID NO: 414630 - DNA, 20 bp, Artificial Sequence
  Description of Artificial Sequence: Synthetic oligonucleotide
  Target: LAMA2; (+) strand; PAM type: YTN; PAM sequence: TTT
ctttctctacaattctatta

SEQ ID NO: 414631 - DNA, 20 bp, Artificial Sequence
  Description of Artificial Sequence: Synthetic oligonucleotide
  Target: LAMA2; (+) strand; PAM type: YTN; PAM sequence: TTC
tttctctacaattctattag

SEQ ID NO: 414632 - DNA, 20 bp, Artificial Sequence
  Description of Artificial Sequence: Synthetic oligonucleotide
  Target: LAMA2; (+) strand; PAM type: YTN; PAM sequence: CTT
tctctacaattctattagta

SEQ ID NO: 414633 - DNA, 20 bp, Artificial Sequence
  Description of Artificial Sequence: Synthetic oligonucleotide
  Target: LAMA2; (+) strand; PAM type: YTN; PAM sequence: TTT
ctctacaattctattagtaa

SEQ ID NO: 414634 - DNA, 20 bp, Artificial Sequence
  Description of Artificial Sequence: Synthetic oligonucleotide
  Target: LAMA2; (+) strand; PAM type: YTN; PAM sequence: TTC
tctacaattctattagtaag

SEQ ID NO: 414635 - DNA, 20 bp, Artificial Sequence
  Description of Artificial Sequence: Synthetic oligonucleotide
  Target: LAMA2; (+) strand; PAM type: YTN; PAM sequence: CTC
tacaattctattagtaaggc

SEQ ID NO: 414636 - DNA, 20 bp, Artificial Sequence
  Description of Artificial Sequence: Synthetic oligonucleotide
  Target: LAMA2; (+) strand; PAM type: YTN; PAM sequence: CTA
caattctattagtaaggcta

SEQ ID NO: 414637 - DNA, 20 bp, Artificial Sequence
  Description of Artificial Sequence: Synthetic oligonucleotide
  Target: LAMA2; (+) strand; PAM type: YTN; PAM sequence: TTC
tattagtaaggctaaaaaca

SEQ ID NO: 414638 - DNA, 20 bp, Artificial Sequence
  Description of Artificial Sequence: Synthetic oligonucleotide
  Target: LAMA2; (+) strand; PAM type: YTN; PAM sequence: CTA
ttagtaaggctaaaaacaaa

SEQ ID NO: 414639 - DNA, 20 bp, Artificial Sequence
  Description of Artificial Sequence: Synthetic oligonucleotide
  Target: LAMA2; (+) strand; PAM type: YTN; PAM sequence: TTA
gtaaggctaaaaacaaaacc

SEQ ID NO: 414640 - DNA, 20 bp, Artificial Sequence
  Description of Artificial Sequence: Synthetic oligonucleotide
  Target: LAMA2; (+) strand; PAM type: YTN; PAM sequence: CTA
aaaacaaaaccactaacttt

SEQ ID NO: 414641 - DNA, 20 bp, Artificial Sequence
  Description of Artificial Sequence: Synthetic oligonucleotide
  Target: LAMA2; (+) strand; PAM type: YTN; PAM sequence: CTA
actttgcataaaacagcatt

SEQ ID NO: 414642 - DNA, 20 bp, Artificial Sequence
  Description of Artificial Sequence: Synthetic oligonucleotide
  Target: LAMA2; (+) strand; PAM type: YTN; PAM sequence: CTT
tgcataaaacagcattccaa

SEQ ID NO: 414643 - DNA, 20 bp, Artificial Sequence
  Description of Artificial Sequence: Synthetic oligonucleotide
  Target: LAMA2; (+) strand; PAM type: YTN; PAM sequence: TTT
gcataaaacagcattccaat

SEQ ID NO: 414644 - DNA, 20 bp, Artificial Sequence
  Description of Artificial Sequence: Synthetic oligonucleotide
  Target: LAMA2; (+) strand; PAM type: YTN; PAM sequence: TTG
cataaaacagcattccaatt

SEQ ID NO: 414645 - DNA, 20 bp, Artificial Sequence
  Description of Artificial Sequence: Synthetic oligonucleotide
  Target: LAMA2; (+) strand; PAM type: YTN; PAM sequence: TTC
caatttaatctcaagctaac

SEQ ID NO: 414646 - DNA, 20 bp, Artificial Sequence
  Description of Artificial Sequence: Synthetic oligonucleotide
  Target: LAMA2; (+) strand; PAM type: YTN; PAM sequence: TTT
aatctcaagctaacagttga

SEQ ID NO: 414647 - DNA, 20 bp, Artificial Sequence
  Description of Artificial Sequence: Synthetic oligonucleotide
  Target: LAMA2; (+) strand; PAM type: YTN; PAM sequence: TTA
atctcaagctaacagttgac

SEQ ID NO: 414648 - DNA, 20 bp, Artificial Sequence
  Description of Artificial Sequence: Synthetic oligonucleotide
  Target: LAMA2; (+) strand; PAM type: YTN; PAM sequence: CTC
aagctaacagttgactttga

SEQ ID NO: 414649 - DNA, 20 bp, Artificial Sequence
  Description of Artificial Sequence: Synthetic oligonucleotide
  Target: LAMA2; (+) strand; PAM type: YTN; PAM sequence: CTA
acagttgactttgaaacatg

SEQ ID NO: 414650 - DNA, 20 bp, Artificial Sequence
  Description of Artificial Sequence: Synthetic oligonucleotide
  Target: LAMA2; (+) strand; PAM type: YTN; PAM sequence: TTG
actttgaaacatgctcttaa

SEQ ID NO: 414651 - DNA, 20 bp, Artificial Sequence
  Description of Artificial Sequence: Synthetic oligonucleotide
  Target: LAMA2; (+) strand; PAM type: YTN; PAM sequence: CTT
tgaaacatgctcttaatatt

SEQ ID NO: 414652 - DNA, 20 bp, Artificial Sequence
  Description of Artificial Sequence: Synthetic oligonucleotide
  Target: LAMA2; (+) strand; PAM type: YTN; PAM sequence: TTT
gaaacatgctcttaatattt

SEQ ID NO: 414653 - DNA, 20 bp, Artificial Sequence
  Description of Artificial Sequence: Synthetic oligonucleotide
  Target: LAMA2; (+) strand; PAM type: YTN; PAM sequence: TTG
aaacatgctcttaatatttg

SEQ ID NO: 414654 - DNA, 20 bp, Artificial Sequence
  Description of Artificial Sequence: Synthetic oligonucleotide
  Target: LAMA2; (+) strand; PAM type: YTN; PAM sequence: CTC
ttaatatttggtgcaggaca

SEQ ID NO: 414655 - DNA, 20 bp, Artificial Sequence
  Description of Artificial Sequence: Synthetic oligonucleotide
  Target: LAMA2; (+) strand; PAM type: YTN; PAM sequence: CTT
aatatttggtgcaggacatt

SEQ ID NO: 414656 - DNA, 20 bp, Artificial Sequence
  Description of Artificial Sequence: Synthetic oligonucleotide
  Target: LAMA2; (+) strand; PAM type: YTN; PAM sequence: TTA
atatttggtgcaggacattt

SEQ ID NO: 414657 - DNA, 20 bp, Artificial Sequence
  Description of Artificial Sequence: Synthetic oligonucleotide
  Target: LAMA2; (+) strand; PAM type: YTN; PAM sequence: TTT
ggtgcaggacatttcaaagc

SEQ ID NO: 414658 - DNA, 20 bp, Artificial Sequence
  Description of Artificial Sequence: Synthetic oligonucleotide
  Target: LAMA2; (+) strand; PAM type: YTN; PAM sequence: TTG
gtgcaggacatttcaaagct

SEQ ID NO: 414659 - DNA, 20 bp, Artificial Sequence
  Description of Artificial Sequence: Synthetic oligonucleotide
  Target: LAMA2; (+) strand; PAM type: YTN; PAM sequence: TTT
caaagctgagccctcttgca

SEQ ID NO: 414660 - DNA, 20 bp, Artificial Sequence
  Description of Artificial Sequence: Synthetic oligonucleotide
  Target: LAMA2; (+) strand; PAM type: YTN; PAM sequence: TTC
aaagctgagccctcttgcat

SEQ ID NO: 414661 - DNA, 20 bp, Artificial Sequence
  Description of Artificial Sequence: Synthetic oligonucleotide
  Target: LAMA2; (+) strand; PAM type: YTN; PAM sequence: CTG
agccctcttgcattgccttt

SEQ ID NO: 414662 - DNA, 20 bp, Artificial Sequence
  Description of Artificial Sequence: Synthetic oligonucleotide
  Target: LAMA2; (+) strand; PAM type: YTN; PAM sequence: CTC
ttgcattgcctttttcagat

SEQ ID NO: 414663 - DNA, 20 bp, Artificial Sequence
  Description of Artificial Sequence: Synthetic oligonucleotide
  Target: LAMA2; (+) strand; PAM type: YTN; PAM sequence: CTT
gcattgcctttttcagatga

SEQ ID NO: 414664 - DNA, 20 bp, Artificial Sequence
  Description of Artificial Sequence: Synthetic oligonucleotide
  Target: LAMA2; (+) strand; PAM type: YTN; PAM sequence: TTG
cattgcctttttcagatgac

SEQ ID NO: 414665 - DNA, 20 bp, Artificial Sequence
  Description of Artificial Sequence: Synthetic oligonucleotide
  Target: LAMA2; (+) strand; PAM type: YTN; PAM sequence: TTG
cctttttcagatgacctcaa

SEQ ID NO: 414666 - DNA, 20 bp, Artificial Sequence
  Description of Artificial Sequence: Synthetic oligonucleotide
  Target: LAMA2; (+) strand; PAM type: YTN; PAM sequence: CTT
tttcagatgacctcaagcag

SEQ ID NO: 414667 - DNA, 20 bp, Artificial Sequence
  Description of Artificial Sequence: Synthetic oligonucleotide
  Target: LAMA2; (+) strand; PAM type: YTN; PAM sequence: TTT
ttcagatgacctcaagcagt

SEQ ID NO: 414668 - DNA, 20 bp, Artificial Sequence
  Description of Artificial Sequence: Synthetic oligonucleotide
  Target: LAMA2; (+) strand; PAM type: YTN; PAM sequence: TTT
tcagatgacctcaagcagtt

SEQ ID NO: 414669 - DNA, 20 bp, Artificial Sequence
  Description of Artificial Sequence: Synthetic oligonucleotide
  Target: LAMA2; (+) strand; PAM type: YTN; PAM sequence: TTT
cagatgacctcaagcagttt

SEQ ID NO: 414670 - DNA, 20 bp, Artificial Sequence
  Description of Artificial Sequence: Synthetic oligonucleotide
  Target: LAMA2; (+) strand; PAM type: YTN; PAM sequence: TTC
agatgacctcaagcagtttg

SEQ ID NO: 414671 - DNA, 20 bp, Artificial Sequence
  Description of Artificial Sequence: Synthetic oligonucleotide
  Target: LAMA2; (+) strand; PAM type: YTN; PAM sequence: CTC
aagcagtttggcctaacaac

SEQ ID NO: 414672 - DNA, 20 bp, Artificial Sequence
  Description of Artificial Sequence: Synthetic oligonucleotide
  Target: LAMA2; (+) strand; PAM type: YTN; PAM sequence: TTT
ggcctaacaaccagtattcc

SEQ ID NO: 414673 - DNA, 20 bp, Artificial Sequence
  Description of Artificial Sequence: Synthetic oligonucleotide
  Target: LAMA2; (+) strand; PAM type: YTN; PAM sequence: TTG
gcctaacaaccagtattccg

SEQ ID NO: 414674 - DNA, 20 bp, Artificial Sequence
  Description of Artificial Sequence: Synthetic oligonucleotide
  Target: LAMA2; (+) strand; PAM type: YTN; PAM sequence: CTA
acaaccagtattccgttccg

SEQ ID NO: 414675 - DNA, 20 bp, Artificial Sequence
  Description of Artificial Sequence: Synthetic oligonucleotide
  Target: LAMA2; (+) strand; PAM type: YTN; PAM sequence: TTC
cgttccgaggttgcatcaga

SEQ ID NO: 414676 - DNA, 20 bp, Artificial Sequence
  Description of Artificial Sequence: Synthetic oligonucleotide
  Target: LAMA2; (+) strand; PAM type: YTN; PAM sequence: TTC
cgaggttgcatcagatccct

SEQ ID NO: 414677 - DNA, 20 bp, Artificial Sequence
  Description of Artificial Sequence: Synthetic oligonucleotide
  Target: LAMA2; (+) strand; PAM type: YTN; PAM sequence: TTG
catcagatccctgaagctca

SEQ ID NO: 414678 - DNA, 20 bp, Artificial Sequence
  Description of Artificial Sequence: Synthetic oligonucleotide
  Target: LAMA2; (+) strand; PAM type: YTN; PAM sequence: CTG
aagctcaccaaaggcacagg

SEQ ID NO: 414679 - DNA, 20 bp, Artificial Sequence
  Description of Artificial Sequence: Synthetic oligonucleotide
  Target: LAMA2; (+) strand; PAM type: YTN; PAM sequence: CTC
accaaaggcacaggcaagcc

SEQ ID NO: 414680 - DNA, 20 bp, Artificial Sequence
  Description of Artificial Sequence: Synthetic oligonucleotide
  Target: LAMA2; (+) strand; PAM type: YTN; PAM sequence: CTG
gaggttaattttgccaaggc

SEQ ID NO: 414681 - DNA, 20 bp, Artificial Sequence
  Description of Artificial Sequence: Synthetic oligonucleotide
  Target: LAMA2; (+) strand; PAM type: YTN; PAM sequence: TTA
attttgccaaggccctggaa

SEQ ID NO: 414682 - DNA, 20 bp, Artificial Sequence
  Description of Artificial Sequence: Synthetic oligonucleotide
  Target: LAMA2; (+) strand; PAM type: YTN; PAM sequence: TTT
tgccaaggccctggaactga

SEQ ID NO: 414683 - DNA, 20 bp, Artificial Sequence
  Description of Artificial Sequence: Synthetic oligonucleotide
  Target: LAMA2; (+) strand; PAM type: YTN; PAM sequence: TTT
gccaaggccctggaactgag

SEQ ID NO: 414684 - DNA, 20 bp, Artificial Sequence
  Description of Artificial Sequence: Synthetic oligonucleotide
  Target: LAMA2; (+) strand; PAM type: YTN; PAM sequence: TTG
ccaaggccctggaactgagg

SEQ ID NO: 414685 - DNA, 20 bp, Artificial Sequence
  Description of Artificial Sequence: Synthetic oligonucleotide
  Target: LAMA2; (+) strand; PAM type: YTN; PAM sequence: CTG
gaactgaggggcgttcaacc

SEQ ID NO: 414686 - DNA, 20 bp, Artificial Sequence
  Description of Artificial Sequence: Synthetic oligonucleotide
  Target: LAMA2; (+) strand; PAM type: YTN; PAM sequence: CTG
aggggcgttcaacctgtatc

SEQ ID NO: 414687 - DNA, 20 bp, Artificial Sequence
  Description of Artificial Sequence: Synthetic oligonucleotide
  Target: LAMA2; (+) strand; PAM type: YTN; PAM sequence: TTC
aacctgtatcatgcccagcc

SEQ ID NO: 414688 - DNA, 20 bp, Artificial Sequence
  Description of Artificial Sequence: Synthetic oligonucleotide
  Target: LAMA2; (+) strand; PAM type: YTN; PAM sequence: CTG
tatcatgcccagccaactaa

SEQ ID NO: 414689 - DNA, 20 bp, Artificial Sequence
  Description of Artificial Sequence: Synthetic oligonucleotide
  Target: LAMA2; (+) strand; PAM type: YTN; PAM sequence: CTA
ataaaaataagtgtaacccc

SEQ ID NO: 414690 - DNA, 20 bp, Artificial Sequence
  Description of Artificial Sequence: Synthetic oligonucleotide
  Target: LAMA2; (+) strand; PAM type: YTN; PAM sequence: CTG
tcaaaacaagtatatcaagt

SEQ ID NO: 414691 - DNA, 20 bp, Artificial Sequence
  Description of Artificial Sequence: Synthetic oligonucleotide
  Target: LAMA2; (+) strand; PAM type: YTN; PAM sequence: TTT
tacctatatatgttaattaa

SEQ ID NO: 414692 - DNA, 20 bp, Artificial Sequence
  Description of Artificial Sequence: Synthetic oligonucleotide
  Target: LAMA2; (+) strand; PAM type: YTN; PAM sequence: TTT
acctatatatgttaattaaa

SEQ ID NO: 414693 - DNA, 20 bp, Artificial Sequence
  Description of Artificial Sequence: Synthetic oligonucleotide
  Target: LAMA2; (+) strand; PAM type: YTN; PAM sequence: TTA
cctatatatgttaattaaac

SEQ ID NO: 414694 - DNA, 20 bp, Artificial Sequence
  Description of Artificial Sequence: Synthetic oligonucleotide
  Target: LAMA2; (+) strand; PAM type: YTN; PAM sequence: CTA
tatatgttaattaaactaat

SEQ ID NO: 414695 - DNA, 20 bp, Artificial Sequence
  Description of Artificial Sequence: Synthetic oligonucleotide
  Target: LAMA2; (+) strand; PAM type: YTN; PAM sequence: TTA
attaaactaatttgtgcatg

SEQ ID NO: 414696 - DNA, 20 bp, Artificial Sequence
  Description of Artificial Sequence: Synthetic oligonucleotide
  Target: LAMA2; (+) strand; PAM type: YTN; PAM sequence: TTA
aactaatttgtgcatgtaca

SEQ ID NO: 414697 - DNA, 20 bp, Artificial Sequence
  Description of Artificial Sequence: Synthetic oligonucleotide
  Target: LAMA2; (+) strand; PAM type: YTN; PAM sequence: CTA
atttgtgcatgtacatagaa

SEQ ID NO: 414698 - DNA, 20 bp, Artificial Sequence
  Description of Artificial Sequence: Synthetic oligonucleotide
  Target: LAMA2; (+) strand; PAM type: YTN; PAM sequence: TTT
gtgcatgtacatagaattct

SEQ ID NO: 414699 - DNA, 20 bp, Artificial Sequence
  Description of Artificial Sequence: Synthetic oligonucleotide
  Target: LAMA2; (+) strand; PAM type: YTN; PAM sequence: TTG
tgcatgtacatagaattctt

SEQ ID NO: 414700 - DNA, 20 bp, Artificial Sequence
  Description of Artificial Sequence: Synthetic oligonucleotide
  Target: LAMA2; (+) strand; PAM type: YTN; PAM sequence: TTC
tttctgtattcagatggtgc

SEQ ID NO: 414701 - DNA, 20 bp, Artificial Sequence
  Description of Artificial Sequence: Synthetic oligonucleotide
  Target: LAMA2; (+) strand; PAM type: YTN; PAM sequence: CTT
tctgtattcagatggtgcta

SEQ ID NO: 414702 - DNA, 20 bp, Artificial Sequence
  Description of Artificial Sequence: Synthetic oligonucleotide
  Target: LAMA2; (+) strand; PAM type: YTN; PAM sequence: TTT
ctgtattcagatggtgctaa

SEQ ID NO: 414703 - DNA, 20 bp, Artificial Sequence
  Description of Artificial Sequence: Synthetic oligonucleotide
  Target: LAMA2; (+) strand; PAM type: YTN; PAM sequence: TTC
tgtattcagatggtgctaat

SEQ ID NO: 414704 - DNA, 20 bp, Artificial Sequence
  Description of Artificial Sequence: Synthetic oligonucleotide
  Target: LAMA2; (+) strand; PAM type: YTN; PAM sequence: CTG
tattcagatggtgctaattc

SEQ ID NO: 414705 - DNA, 20 bp, Artificial Sequence
  Description of Artificial Sequence: Synthetic oligonucleotide
  Target: LAMA2; (+) strand; PAM type: YTN; PAM sequence: TTC
agatggtgctaattcagact

SEQ ID NO: 414706 - DNA, 20 bp, Artificial Sequence
  Description of Artificial Sequence: Synthetic oligonucleotide
  Target: LAMA2; (+) strand; PAM type: YTN; PAM sequence: CTA
attcagactccagactgaat

SEQ ID NO: 414707 - DNA, 20 bp, Artificial Sequence
  Description of Artificial Sequence: Synthetic oligonucleotide
  Target: LAMA2; (+) strand; PAM type: YTN; PAM sequence: TTC
agactccagactgaatttta

SEQ ID NO: 414708 - DNA, 20 bp, Artificial Sequence
  Description of Artificial Sequence: Synthetic oligonucleotide
  Target: LAMA2; (+) strand; PAM type: YTN; PAM sequence: CTC
cagactgaattttaattcaa

SEQ ID NO: 414709 - DNA, 20 bp, Artificial Sequence
  Description of Artificial Sequence: Synthetic oligonucleotide
  Target: LAMA2; (+) strand; PAM type: YTN; PAM sequence: CTG
aattttaattcaagttcttt

SEQ ID NO: 414710 - DNA, 20 bp, Artificial Sequence
  Description of Artificial Sequence: Synthetic oligonucleotide
  Target: LAMA2; (+) strand; PAM type: YTN; PAM sequence: TTT
taattcaagttctttctcaa

SEQ ID NO: 414711 - DNA, 20 bp, Artificial Sequence
  Description of Artificial Sequence: Synthetic oligonucleotide
  Target: LAMA2; (+) strand; PAM type: YTN; PAM sequence: TTT
aattcaagttctttctcaag

SEQ ID NO: 414712 - DNA, 20 bp, Artificial Sequence
  Description of Artificial Sequence: Synthetic oligonucleotide
  Target: LAMA2; (+) strand; PAM type: YTN; PAM sequence: TTA
attcaagttctttctcaagt

SEQ ID NO: 414713 - DNA, 20 bp, Artificial Sequence
  Description of Artificial Sequence: Synthetic oligonucleotide
  Target: LAMA2; (+) strand; PAM type: YTN; PAM sequence: TTC
aagttctttctcaagtctat

SEQ ID NO: 414714 - DNA, 20 bp, Artificial Sequence
  Description of Artificial Sequence: Synthetic oligonucleotide
  Target: LAMA2; (+) strand; PAM type: YTN; PAM sequence: TTC
tttctcaagtctataaataa

SEQ ID NO: 414715 - DNA, 20 bp, Artificial Sequence
  Description of Artificial Sequence: Synthetic oligonucleotide
  Target: LAMA2; (+) strand; PAM type: YTN; PAM sequence: CTT
tctcaagtctataaataata

SEQ ID NO: 414716 - DNA, 20 bp, Artificial Sequence
  Description of Artificial Sequence: Synthetic oligonucleotide
  Target: LAMA2; (+) strand; PAM type: YTN; PAM sequence: TTT
ctcaagtctataaataatat

SEQ ID NO: 414717 - DNA, 20 bp, Artificial Sequence
  Description of Artificial Sequence: Synthetic oligonucleotide
  Target: LAMA2; (+) strand; PAM type: YTN; PAM sequence: TTC
tcaagtctataaataatatt

SEQ ID NO: 414718 - DNA, 20 bp, Artificial Sequence
  Description of Artificial Sequence: Synthetic oligonucleotide
  Target: LAMA2; (+) strand; PAM type: YTN; PAM sequence: CTC
aagtctataaataatattaa

SEQ ID NO: 414719 - DNA, 20 bp, Artificial Sequence
  Description of Artificial Sequence: Synthetic oligonucleotide
  Target: LAMA2; (+) strand; PAM type: YTN; PAM sequence: CTA
taaataatattaaactgatt

SEQ ID NO: 414720 - DNA, 20 bp, Artificial Sequence
  Description of Artificial Sequence: Synthetic oligonucleotide
  Target: LAMA2; (+) strand; PAM type: YTN; PAM sequence: TTA
aactgattatttcattctaa

SEQ ID NO: 414721 - DNA, 20 bp, Artificial Sequence
  Description of Artificial Sequence: Synthetic oligonucleotide
  Target: LAMA2; (+) strand; PAM type: YTN; PAM sequence: CTG
attatttcattctaaataat

SEQ ID NO: 414722 - DNA, 20 bp, Artificial Sequence
  Description of Artificial Sequence: Synthetic oligonucleotide
  Target: LAMA2; (+) strand; PAM type: YTN; PAM sequence: TTA
tttcattctaaataattgcc

SEQ ID NO: 414723 - DNA, 20 bp, Artificial Sequence
  Description of Artificial Sequence: Synthetic oligonucleotide
  Target: LAMA2; (+) strand; PAM type: YTN; PAM sequence: TTT
cattctaaataattgcctgt

SEQ ID NO: 414724 - DNA, 20 bp, Artificial Sequence
  Description of Artificial Sequence: Synthetic oligonucleotide
  Target: LAMA2; (+) strand; PAM type: YTN; PAM sequence: TTC
attctaaataattgcctgtt

SEQ ID NO: 414725 - DNA, 20 bp, Artificial Sequence
  Description of Artificial Sequence: Synthetic oligonucleotide
  Target: LAMA2; (+) strand; PAM type: YTN; PAM sequence: TTC
taaataattgcctgttttgt

SEQ ID NO: 414726 - DNA, 20 bp, Artificial Sequence
  Description of Artificial Sequence: Synthetic oligonucleotide
  Target: LAMA2; (+) strand; PAM type: YTN; PAM sequence: CTA
aataattgcctgttttgtgt

SEQ ID NO: 414727 - DNA, 20 bp, Artificial Sequence
  Description of Artificial Sequence: Synthetic oligonucleotide
  Target: LAMA2; (+) strand; PAM type: YTN; PAM sequence: TTG
cctgttttgtgtgattttaa

SEQ ID NO: 414728 - DNA, 20 bp, Artificial Sequence
  Description of Artificial Sequence: Synthetic oligonucleotide
  Target: LAMA2; (+) strand; PAM type: YTN; PAM sequence: CTG
ttttgtgtgattttaaggat

SEQ ID NO: 414729 - DNA, 20 bp, Artificial Sequence
  Description of Artificial Sequence: Synthetic oligonucleotide
  Target: LAMA2; (+) strand; PAM type: YTN; PAM sequence: TTT
tgtgtgattttaaggataaa

SEQ ID NO: 414730 - DNA, 20 bp, Artificial Sequence
  Description of Artificial Sequence: Synthetic oligonucleotide
  Target: LAMA2; (+) strand; PAM type: YTN; PAM sequence: TTT
gtgtgattttaaggataaaa

SEQ ID NO: 414731 - DNA, 20 bp, Artificial Sequence
  Description of Artificial Sequence: Synthetic oligonucleotide
  Target: LAMA2; (+) strand; PAM type: YTN; PAM sequence: TTG
tgtgattttaaggataaaag

SEQ ID NO: 414732 - DNA, 20 bp, Artificial Sequence
  Description of Artificial Sequence: Synthetic oligonucleotide
  Target: LAMA2; (+) strand; PAM type: YTN; PAM sequence: TTT
taaggataaaaggtaactgg

SEQ ID NO: 414733 - DNA, 20 bp, Artificial Sequence
  Description of Artificial Sequence: Synthetic oligonucleotide
  Target: LAMA2; (+) strand; PAM type: YTN; PAM sequence: TTT
aaggataaaaggtaactggc

SEQ ID NO: 414734 - DNA, 20 bp, Artificial Sequence
  Description of Artificial Sequence: Synthetic oligonucleotide
  Target: LAMA2; (+) strand; PAM type: YTN; PAM sequence: TTA
aggataaaaggtaactggcc

SEQ ID NO: 414735 - DNA, 20 bp, Artificial Sequence
  Description of Artificial Sequence: Synthetic oligonucleotide
  Target: LAMA2; (+) strand; PAM type: YTN; PAM sequence: CTG
gccataaattgttgagtttg

SEQ ID NO: 414736 - DNA, 20 bp, Artificial Sequence
  Description of Artificial Sequence: Synthetic oligonucleotide
  Target: LAMA2; (+) strand; PAM type: YTN; PAM sequence: TTG
ttgagtttgcaacatgccct

SEQ ID NO: 414737 - DNA, 20 bp, Artificial Sequence
  Description of Artificial Sequence: Synthetic oligonucleotide
  Target: LAMA2; (+) strand; PAM type: YTN; PAM sequence: TTG
agtttgcaacatgccctcca

SEQ ID NO: 414738 - DNA, 20 bp, Artificial Sequence
  Description of Artificial Sequence: Synthetic oligonucleotide
  Target: LAMA2; (+) strand; PAM type: YTN; PAM sequence: TTT
gcaacatgccctccagtcat

SEQ ID NO: 414739 - DNA, 20 bp, Artificial Sequence
  Description of Artificial Sequence: Synthetic oligonucleotide
  Target: LAMA2; (+) strand; PAM type: YTN; PAM sequence: TTG
caacatgccctccagtcatc

SEQ ID NO: 414740 - DNA, 20 bp, Artificial Sequence
  Description of Artificial Sequence: Synthetic oligonucleotide
  Target: LAMA2; (+) strand; PAM type: YTN; PAM sequence: CTC
cagtcatctcaaggaaagag

SEQ ID NO: 414741 - DNA, 20 bp, Artificial Sequence
  Description of Artificial Sequence: Synthetic oligonucleotide
  Target: LAMA2; (+) strand; PAM type: YTN; PAM sequence: CTC
aaggaaagagttcagatgta

SEQ ID NO: 414742 - DNA, 20 bp, Artificial Sequence
  Description of Artificial Sequence: Synthetic oligonucleotide
  Target: LAMA2; (+) strand; PAM type: YTN; PAM sequence: TTC
agatgtaatttatggaggca

SEQ ID NO: 414743 - DNA, 20 bp, Artificial Sequence
  Description of Artificial Sequence: Synthetic oligonucleotide
  Target: LAMA2; (+) strand; PAM type: YTN; PAM sequence: TTT
atggaggcaattttttttaa

SEQ ID NO: 414744 - DNA, 20 bp, Artificial Sequence
  Description of Artificial Sequence: Synthetic oligonucleotide
  Target: LAMA2; (+) strand; PAM type: YTN; PAM sequence: TTA
tggaggcaattttttttaac

SEQ ID NO: 414745 - DNA, 20 bp, Artificial Sequence
  Description of Artificial Sequence: Synthetic oligonucleotide
  Target: LAMA2; (+) strand; PAM type: YTN; PAM sequence: TTT
tttttaacttattcctatca

SEQ ID NO: 414746 - DNA, 20 bp, Artificial Sequence
  Description of Artificial Sequence: Synthetic oligonucleotide
  Target: LAMA2; (+) strand; PAM type: YTN; PAM sequence: TTT
ttttaacttattcctatcaa

SEQ ID NO: 414747 - DNA, 20 bp, Artificial Sequence
  Description of Artificial Sequence: Synthetic oligonucleotide
  Target: LAMA2; (+) strand; PAM type: YTN; PAM sequence: TTT
tttaacttattcctatcaat

SEQ ID NO: 414748 - DNA, 20 bp, Artificial Sequence
  Description of Artificial Sequence: Synthetic oligonucleotide
  Target: LAMA2; (+) strand; PAM type: YTN; PAM sequence: TTT
ttaacttattcctatcaata

SEQ ID NO: 414749 - DNA, 20 bp, Artificial Sequence
  Description of Artificial Sequence: Synthetic oligonucleotide
  Target: LAMA2; (+) strand; PAM type: YTN; PAM sequence: TTT
taacttattcctatcaatac

SEQ ID NO: 414750 - DNA, 20 bp, Artificial Sequence
  Description of Artificial Sequence: Synthetic oligonucleotide
  Target: LAMA2; (+) strand; PAM type: YTN; PAM sequence: TTT
aacttattcctatcaatact

SEQ ID NO: 414751 - DNA, 20 bp, Artificial Sequence
  Description of Artificial Sequence: Synthetic oligonucleotide
  Target: LAMA2; (+) strand; PAM type: YTN; PAM sequence: TTA
acttattcctatcaatactt

SEQ ID NO: 414752 - DNA, 20 bp, Artificial Sequence
  Description of Artificial Sequence: Synthetic oligonucleotide
  Target: LAMA2; (+) strand; PAM type: YTN; PAM sequence: CTT
attcctatcaatacttcttc

SEQ ID NO: 414753 - DNA, 20 bp, Artificial Sequence
  Description of Artificial Sequence: Synthetic oligonucleotide
  Target: LAMA2; (+) strand; PAM type: YTN; PAM sequence: TTA
ttcctatcaatacttcttct

SEQ ID NO: 414754 - DNA, 20 bp, Artificial Sequence
  Description of Artificial Sequence: Synthetic oligonucleotide
  Target: LAMA2; (+) strand; PAM type: YTN; PAM sequence: TTC
ctatcaatacttcttctttc

SEQ ID NO: 414755 - DNA, 20 bp, Artificial Sequence
  Description of Artificial Sequence: Synthetic oligonucleotide
  Target: LAMA2; (+) strand; PAM type: YTN; PAM sequence: CTA
tcaatacttcttctttcttt

SEQ ID NO: 414756 - DNA, 20 bp, Artificial Sequence
  Description of Artificial Sequence: Synthetic oligonucleotide
  Target: LAMA2; (+) strand; PAM type: YTN; PAM sequence: CTT
cttctttcttttatcatcct

SEQ ID NO: 414757 - DNA, 20 bp, Artificial Sequence
  Description of Artificial Sequence: Synthetic oligonucleotide
  Target: LAMA2; (+) strand; PAM type: YTN; PAM sequence: TTC
ttctttcttttatcatcctt

SEQ ID NO: 414758 - DNA, 20 bp, Artificial Sequence
  Description of Artificial Sequence: Synthetic oligonucleotide
  Target: LAMA2; (+) strand; PAM type: YTN; PAM sequence: CTT
ctttcttttatcatccttta

SEQ ID NO: 414759 - DNA, 20 bp, Artificial Sequence
  Description of Artificial Sequence: Synthetic oligonucleotide
  Target: LAMA2; (+) strand; PAM type: YTN; PAM sequence: TTC
tttcttttatcatcctttac

SEQ ID NO: 414760 - DNA, 20 bp, Artificial Sequence
  Description of Artificial Sequence: Synthetic oligonucleotide
  Target: LAMA2; (+) strand; PAM type: YTN; PAM sequence: CTT
tcttttatcatcctttacca

SEQ ID NO: 414761 - DNA, 20 bp, Artificial Sequence
  Description of Artificial Sequence: Synthetic oligonucleotide
  Target: LAMA2; (+) strand; PAM type: YTN; PAM sequence: TTT
cttttatcatcctttaccat

SEQ ID NO: 414762 - DNA, 20 bp, Artificial Sequence
  Description of Artificial Sequence: Synthetic oligonucleotide
  Target: LAMA2; (+) strand; PAM type: YTN; PAM sequence: TTC
ttttatcatcctttaccatg

SEQ ID NO: 414763 - DNA, 20 bp, Artificial Sequence
  Description of Artificial Sequence: Synthetic oligonucleotide
  Target: LAMA2; (+) strand; PAM type: YTN; PAM sequence: CTT
ttatcatcctttaccatgta

SEQ ID NO: 414764 - DNA, 20 bp, Artificial Sequence
  Description of Artificial Sequence: Synthetic oligonucleotide
  Target: LAMA2; (+) strand; PAM type: YTN; PAM sequence: TTT
tatcatcctttaccatgtat

SEQ ID NO: 414765 - DNA, 20 bp, Artificial Sequence
  Description of Artificial Sequence: Synthetic oligonucleotide
  Target: LAMA2; (+) strand; PAM type: YTN; PAM sequence: TTT
atcatcctttaccatgtatg

SEQ ID NO: 414766 - DNA, 20 bp, Artificial Sequence
  Description of Artificial Sequence: Synthetic oligonucleotide
  Target: LAMA2; (+) strand; PAM type: YTN; PAM sequence: TTA
tcatcctttaccatgtatga

SEQ ID NO: 414767 - DNA, 20 bp, Artificial Sequence
  Description of Artificial Sequence: Synthetic oligonucleotide
  Target: LAMA2; (+) strand; PAM type: YTN; PAM sequence: CTT
taccatgtatgacagctttg

SEQ ID NO: 414768 - DNA, 20 bp, Artificial Sequence
  Description of Artificial Sequence: Synthetic oligonucleotide
  Target: LAMA2; (+) strand; PAM type: YTN; PAM sequence: TTT
accatgtatgacagctttgg

SEQ ID NO: 414769 - DNA, 20 bp, Artificial Sequence
  Description of Artificial Sequence: Synthetic oligonucleotide
  Target: LAMA2; (+) strand; PAM type: YTN; PAM sequence: TTA
ccatgtatgacagctttggc

SEQ ID NO: 414770 - DNA, 20 bp, Artificial Sequence
  Description of Artificial Sequence: Synthetic oligonucleotide
  Target: LAMA2; (+) strand; PAM type: YTN; PAM sequence: CTT
tggccttctgtccaagccac

SEQ ID NO: 414771 - DNA, 20 bp, Artificial Sequence
  Description of Artificial Sequence: Synthetic oligonucleotide
  Target: LAMA2; (+) strand; PAM type: YTN; PAM sequence: TTT
ggccttctgtccaagccact

SEQ ID NO: 414772 - DNA, 20 bp, Artificial Sequence
  Description of Artificial Sequence: Synthetic oligonucleotide
  Target: LAMA2; (+) strand; PAM type: YTN; PAM sequence: TTG
gccttctgtccaagccactg

SEQ ID NO: 414773 - DNA, 20 bp, Artificial Sequence
  Description of Artificial Sequence: Synthetic oligonucleotide
  Target: LAMA2; (+) strand; PAM type: YTN; PAM sequence: CTT
ctgtccaagccactgacagc

SEQ ID NO: 414774 - DNA, 20 bp, Artificial Sequence
  Description of Artificial Sequence: Synthetic oligonucleotide
  Target: LAMA2; (+) strand; PAM type: YTN; PAM sequence: TTC
tgtccaagccactgacagca

SEQ ID NO: 414775 - DNA, 20 bp, Artificial Sequence
  Description of Artificial Sequence: Synthetic oligonucleotide
  Target: LAMA2; (+) strand; PAM type: YTN; PAM sequence: CTG
tccaagccactgacagcaag

SEQ ID NO: 414776 - DNA, 20 bp, Artificial Sequence
  Description of Artificial Sequence: Synthetic oligonucleotide
  Target: LAMA2; (+) strand; PAM type: YTN; PAM sequence: CTG
acagcaagtgaatttggcat

SEQ ID NO: 414777 - DNA, 20 bp, Artificial Sequence
  Description of Artificial Sequence: Synthetic oligonucleotide
  Target: LAMA2; (+) strand; PAM type: YTN; PAM sequence: TTT
ggcatgtgtgattgggagga

SEQ ID NO: 414778 - DNA, 20 bp, Artificial Sequence
  Description of Artificial Sequence: Synthetic oligonucleotide
  Target: LAMA2; (+) strand; PAM type: YTN; PAM sequence: TTG
gcatgtgtgattgggaggaa

SEQ ID NO: 414779 - DNA, 20 bp, Artificial Sequence
  Description of Artificial Sequence: Synthetic oligonucleotide
  Target: LAMA2; (+) strand; PAM type: YTN; PAM sequence: TTG
ggaggaaatcagttccctta

SEQ ID NO: 414780 - DNA, 20 bp, Artificial Sequence
  Description of Artificial Sequence: Synthetic oligonucleotide
  Target: LAMA2; (+) strand; PAM type: YTN; PAM sequence: TTC
ccttactctatttatgaaag

SEQ ID NO: 414781 - DNA, 20 bp, Artificial Sequence
  Description of Artificial Sequence: Synthetic oligonucleotide
  Target: LAMA2; (+) strand; PAM type: YTN; PAM sequence: CTT
actctatttatgaaagaatt

SEQ ID NO: 414782 - DNA, 20 bp, Artificial Sequence
  Description of Artificial Sequence: Synthetic oligonucleotide
  Target: LAMA2; (+) strand; PAM type: YTN; PAM sequence: TTA
ctctatttatgaaagaatta

SEQ ID NO: 414783 - DNA, 20 bp, Artificial Sequence
  Description of Artificial Sequence: Synthetic oligonucleotide
  Target: LAMA2; (+) strand; PAM type: YTN; PAM sequence: CTC
tatttatgaaagaattatta

SEQ ID NO: 414784 - DNA, 20 bp, Artificial Sequence
  Description of Artificial Sequence: Synthetic oligonucleotide
  Target: LAMA2; (+) strand; PAM type: YTN; PAM sequence: CTA
tttatgaaagaattattagc

SEQ ID NO: 414785 - DNA, 20 bp, Artificial Sequence
  Description of Artificial Sequence: Synthetic oligonucleotide
  Target: LAMA2; (+) strand; PAM type: YTN; PAM sequence: TTT
atgaaagaattattagcaaa

SEQ ID NO: 414786 - DNA, 20 bp, Artificial Sequence
  Description of Artificial Sequence: Synthetic oligonucleotide
  Target: LAMA2; (+) strand; PAM type: YTN; PAM sequence: TTA
tgaaagaattattagcaaat

SEQ ID NO: 414787 - DNA, 20 bp, Artificial Sequence
  Description of Artificial Sequence: Synthetic oligonucleotide
  Target: LAMA2; (+) strand; PAM type: YTN; PAM sequence: TTA
ttagcaaatcattgtcctga

SEQ ID NO: 414788 - DNA, 20 bp, Artificial Sequence
  Description of Artificial Sequence: Synthetic oligonucleotide
  Target: LAMA2; (+) strand; PAM type: YTN; PAM sequence: TTA
gcaaatcattgtcctgaccc

SEQ ID NO: 414789 - DNA, 20 bp, Artificial Sequence
  Description of Artificial Sequence: Synthetic oligonucleotide
  Target: LAMA2; (+) strand; PAM type: YTN; PAM sequence: TTG
tcctgacccaagttcattat

SEQ ID NO: 414790 - DNA, 20 bp, Artificial Sequence
  Description of Artificial Sequence: Synthetic oligonucleotide
  Target: LAMA2; (+) strand; PAM type: YTN; PAM sequence: CTG
acccaagttcattattagag

SEQ ID NO: 414791 - DNA, 20 bp, Artificial Sequence
  Description of Artificial Sequence: Synthetic oligonucleotide
  Target: LAMA2; (+) strand; PAM type: YTN; PAM sequence: TTC
attattagagagtttaacta

SEQ ID NO: 414792 - DNA, 20 bp, Artificial Sequence
  Description of Artificial Sequence: Synthetic oligonucleotide
  Target: LAMA2; (+) strand; PAM type: YTN; PAM sequence: TTA
ttagagagtttaactagccg

SEQ ID NO: 414793 - DNA, 20 bp, Artificial Sequence
  Description of Artificial Sequence: Synthetic oligonucleotide
  Target: LAMA2; (+) strand; PAM type: YTN; PAM sequence: TTA
gagagtttaactagccgtat

SEQ ID NO: 414794 - DNA, 20 bp, Artificial Sequence
  Description of Artificial Sequence: Synthetic oligonucleotide
  Target: LAMA2; (+) strand; PAM type: YTN; PAM sequence: TTT
aactagccgtatgagtgaat

SEQ ID NO: 414795 - DNA, 20 bp, Artificial Sequence
  Description of Artificial Sequence: Synthetic oligonucleotide
  Target: LAMA2; (+) strand; PAM type: YTN; PAM sequence: TTA
actagccgtatgagtgaata

SEQ ID NO: 414796 - DNA, 20 bp, Artificial Sequence
  Description of Artificial Sequence: Synthetic oligonucleotide
  Target: LAMA2; (+) strand; PAM type: YTN; PAM sequence: CTA
gccgtatgagtgaatagctt

SEQ ID NO: 414797 - DNA, 20 bp, Artificial Sequence
  Description of Artificial Sequence: Synthetic oligonucleotide
  Target: LAMA2; (+) strand; PAM type: YTN; PAM sequence: CTT
tttatgctgaaggtagaggg

SEQ ID NO: 414798 - DNA, 20 bp, Artificial Sequence
  Description of Artificial Sequence: Synthetic oligonucleotide
  Target: LAMA2; (+) strand; PAM type: YTN; PAM sequence: TTT
ttatgctgaaggtagagggt

SEQ ID NO: 414799 - DNA, 20 bp, Artificial Sequence
  Description of Artificial Sequence: Synthetic oligonucleotide
  Target: LAMA2; (+) strand; PAM type: YTN; PAM sequence: TTT
tatgctgaaggtagagggta

SEQ ID NO: 414800 - DNA, 20 bp, Artificial Sequence
  Description of Artificial Sequence: Synthetic oligonucleotide
  Target: LAMA2; (+) strand; PAM type: YTN; PAM sequence: TTT
atgctgaaggtagagggtat

SEQ ID NO: 414801 - DNA, 20 bp, Artificial Sequence
  Description of Artificial Sequence: Synthetic oligonucleotide
  Target: LAMA2; (+) strand; PAM type: YTN; PAM sequence: TTA
tgctgaaggtagagggtata

SEQ ID NO: 414802 - DNA, 20 bp, Artificial Sequence
  Description of Artificial Sequence: Synthetic oligonucleotide
  Target: LAMA2; (+) strand; PAM type: YTN; PAM sequence: CTG
aaggtagagggtatagacca

SEQ ID NO: 414803 - DNA, 20 bp, Artificial Sequence
  Description of Artificial Sequence: Synthetic oligonucleotide
  Target: LAMA2; (+) strand; PAM type: YTN; PAM sequence: TTC
aggccagaaagcttaattac

SEQ ID NO: 414804 - DNA, 20 bp, Artificial Sequence
  Description of Artificial Sequence: Synthetic oligonucleotide
  Target: LAMA2; (+) strand; PAM type: YTN; PAM sequence: CTT
aattacttgattttcttatt

SEQ ID NO: 414805 - DNA, 20 bp, Artificial Sequence
  Description of Artificial Sequence: Synthetic oligonucleotide
  Target: LAMA2; (+) strand; PAM type: YTN; PAM sequence: TTA
attacttgattttcttattt

SEQ ID NO: 414806 - DNA, 20 bp, Artificial Sequence
  Description of Artificial Sequence: Synthetic oligonucleotide
  Target: LAMA2; (+) strand; PAM type: YTN; PAM sequence: TTA
cttgattttcttatttgata

SEQ ID NO: 414807 - DNA, 20 bp, Artificial Sequence
  Description of Artificial Sequence: Synthetic oligonucleotide
  Target: LAMA2; (+) strand; PAM type: YTN; PAM sequence: CTT
gattttcttatttgataatg

SEQ ID NO: 414808 - DNA, 20 bp, Artificial Sequence
  Description of Artificial Sequence: Synthetic oligonucleotide
  Target: LAMA2; (+) strand; PAM type: YTN; PAM sequence: TTG
attttcttatttgataatga

SEQ ID NO: 414809 - DNA, 20 bp, Artificial Sequence
  Description of Artificial Sequence: Synthetic oligonucleotide
  Target: LAMA2; (+) strand; PAM type: YTN; PAM sequence: TTT
tcttatttgataatgattta

SEQ ID NO: 414810 - DNA, 20 bp, Artificial Sequence
  Description of Artificial Sequence: Synthetic oligonucleotide
  Target: LAMA2; (+) strand; PAM type: YTN; PAM sequence: TTT
cttatttgataatgatttat

SEQ ID NO: 414811 - DNA, 20 bp, Artificial Sequence
  Description of Artificial Sequence: Synthetic oligonucleotide
  Target: LAMA2; (+) strand; PAM type: YTN; PAM sequence: TTC
ttatttgataatgatttatg

SEQ ID NO: 414812 - DNA, 20 bp, Artificial Sequence
  Description of Artificial Sequence: Synthetic oligonucleotide
  Target: LAMA2; (+) strand; PAM type: YTN; PAM sequence: CTT
atttgataatgatttatggg

SEQ ID NO: 414813 - DNA, 20 bp, Artificial Sequence
  Description of Artificial Sequence: Synthetic oligonucleotide
  Target: LAMA2; (+) strand; PAM type: YTN; PAM sequence: TTA
tttgataatgatttatgggc

SEQ ID NO: 414814 - DNA, 20 bp, Artificial Sequence
  Description of Artificial Sequence: Synthetic oligonucleotide
  Target: LAMA2; (+) strand; PAM type: YTN; PAM sequence: TTT
gataatgatttatgggcttt

SEQ ID NO: 414815 - DNA, 20 bp, Artificial Sequence
  Description of Artificial Sequence: Synthetic oligonucleotide
  Target: LAMA2; (+) strand; PAM type: YTN; PAM sequence: TTG
ataatgatttatgggctttg

SEQ ID NO: 414816 - DNA, 20 bp, Artificial Sequence
  Description of Artificial Sequence: Synthetic oligonucleotide
  Target: LAMA2; (+) strand; PAM type: YTN; PAM sequence: TTT
atgggctttggggagatgcc

SEQ ID NO: 414817 - DNA, 20 bp, Artificial Sequence
  Description of Artificial Sequence: Synthetic oligonucleotide
  Target: LAMA2; (+) strand; PAM type: YTN; PAM sequence: TTA
tgggctttggggagatgcca

SEQ ID NO: 414818 - DNA, 20 bp, Artificial Sequence
  Description of Artificial Sequence: Synthetic oligonucleotide
  Target: LAMA2; (+) strand; PAM type: YTN; PAM sequence: CTT
tggggagatgccaaaaccaa

SEQ ID NO: 414819 - DNA, 20 bp, Artificial Sequence
  Description of Artificial Sequence: Synthetic oligonucleotide
  Target: LAMA2; (+) strand; PAM type: YTN; PAM sequence: TTT
ggggagatgccaaaaccaag

SEQ ID NO: 414820 - DNA, 20 bp, Artificial Sequence
  Description of Artificial Sequence: Synthetic oligonucleotide
  Target: LAMA2; (+) strand; PAM type: YTN; PAM sequence: TTG
gggagatgccaaaaccaagc

SEQ ID NO: 414821 - DNA, 20 bp, Artificial Sequence
  Description of Artificial Sequence: Synthetic oligonucleotide
  Target: LAMA2; (+) strand; PAM type: YTN; PAM sequence: CTT
atgaatgacaaccaagcaca

SEQ ID NO: 414822 - DNA, 20 bp, Artificial Sequence
  Description of Artificial Sequence: Synthetic oligonucleotide
  Target: LAMA2; (+) strand; PAM type: YTN; PAM sequence: TTA
tgaatgacaaccaagcacac

SEQ ID NO: 414823 - DNA, 20 bp, Artificial Sequence
  Description of Artificial Sequence: Synthetic oligonucleotide
  Target: LAMA2; (+) strand; PAM type: YTN; PAM sequence: TTT
gatactacagtactaagaaa

SEQ ID NO: 414824 - DNA, 20 bp, Artificial Sequence
  Description of Artificial Sequence: Synthetic oligonucleotide
  Target: LAMA2; (+) strand; PAM type: YTN; PAM sequence: TTG
atactacagtactaagaaag

SEQ ID NO: 414825 - DNA, 20 bp, Artificial Sequence
  Description of Artificial Sequence: Synthetic oligonucleotide
  Target: LAMA2; (+) strand; PAM type: YTN; PAM sequence: CTA
cagtactaagaaagatttgg

SEQ ID NO: 414826 - DNA, 20 bp, Artificial Sequence
  Description of Artificial Sequence: Synthetic oligonucleotide
  Target: LAMA2; (+) strand; PAM type: YTN; PAM sequence: CTA
agaaagatttggggctctct

SEQ ID NO: 414827 - DNA, 20 bp, Artificial Sequence
  Description of Artificial Sequence: Synthetic oligonucleotide
  Target: LAMA2; (+) strand; PAM type: YTN; PAM sequence: TTT
ggggctctctaagcctacag

SEQ ID NO: 414828 - DNA, 20 bp, Artificial Sequence
  Description of Artificial Sequence: Synthetic oligonucleotide
  Target: LAMA2; (+) strand; PAM type: YTN; PAM sequence: TTG
gggctctctaagcctacagt

SEQ ID NO: 414829 - DNA, 20 bp, Artificial Sequence
  Description of Artificial Sequence: Synthetic oligonucleotide
  Target: LAMA2; (+) strand; PAM type: YTN; PAM sequence: CTC
tctaagcctacagtgaatat

SEQ ID NO: 414830 - DNA, 20 bp, Artificial Sequence
  Description of Artificial Sequence: Synthetic oligonucleotide
  Target: LAMA2; (+) strand; PAM type: YTN; PAM sequence: CTC
taagcctacagtgaatatca

SEQ ID NO: 414831 - DNA, 20 bp, Artificial Sequence
  Description of Artificial Sequence: Synthetic oligonucleotide
  Target: LAMA2; (+) strand; PAM type: YTN; PAM sequence: CTA
agcctacagtgaatatcaca

SEQ ID NO: 414832 - DNA, 20 bp, Artificial Sequence
  Description of Artificial Sequence: Synthetic oligonucleotide
  Target: LAMA2; (+) strand; PAM type: YTN; PAM sequence: CTA
cagtgaatatcacaatttac

SEQ ID NO: 414833 - DNA, 20 bp, Artificial Sequence
  Description of Artificial Sequence: Synthetic oligonucleotide
  Target: LAMA2; (+) strand; PAM type: YTN; PAM sequence: TTT
acacctaggtggagaggaat

SEQ ID NO: 414834 - DNA, 20 bp, Artificial Sequence
  Description of Artificial Sequence: Synthetic oligonucleotide
  Target: LAMA2; (+) strand; PAM type: YTN; PAM sequence: TTA
cacctaggtggagaggaata

SEQ ID NO: 414835 - DNA, 20 bp, Artificial Sequence
  Description of Artificial Sequence: Synthetic oligonucleotide
  Target: LAMA2; (+) strand; PAM type: YTN; PAM sequence: CTA
ggtggagaggaataatgctg

SEQ ID NO: 414836 - DNA, 20 bp, Artificial Sequence
  Description of Artificial Sequence: Synthetic oligonucleotide
  Target: LAMA2; (+) strand; PAM type: YTN; PAM sequence: CTG
aaatgcatttgtacttatca

SEQ ID NO: 414837 - DNA, 20 bp, Artificial Sequence
  Description of Artificial Sequence: Synthetic oligonucleotide
  Target: LAMA2; (+) strand; PAM type: YTN; PAM sequence: TTT
gtacttatcaggaaacaata

SEQ ID NO: 414838 - DNA, 20 bp, Artificial Sequence
  Description of Artificial Sequence: Synthetic oligonucleotide
  Target: LAMA2; (+) strand; PAM type: YTN; PAM sequence: TTG
tacttatcaggaaacaataa

SEQ ID NO: 414839 - DNA, 20 bp, Artificial Sequence
  Description of Artificial Sequence: Synthetic oligonucleotide
  Target: LAMA2; (+) strand; PAM type: YTN; PAM sequence: CTT
atcaggaaacaataaaccag

SEQ ID NO: 414840 - DNA, 20 bp, Artificial Sequence
  Description of Artificial Sequence: Synthetic oligonucleotide
  Target: LAMA2; (+) strand; PAM type: YTN; PAM sequence: TTA
tcaggaaacaataaaccaga

SEQ ID NO: 414841 - DNA, 20 bp, Artificial Sequence
  Description of Artificial Sequence: Synthetic oligonucleotide
  Target: LAMA2; (+) strand; PAM type: YTN; PAM sequence: CTT
aaaaggcatacttcattgag

SEQ ID NO: 414842 - DNA, 20 bp, Artificial Sequence
  Description of Artificial Sequence: Synthetic oligonucleotide
  Target: LAMA2; (+) strand; PAM type: YTN; PAM sequence: TTA
aaaggcatacttcattgagt

SEQ ID NO: 414843 - DNA, 20 bp, Artificial Sequence
  Description of Artificial Sequence: Synthetic oligonucleotide
  Target: LAMA2; (+) strand; PAM type: YTN; PAM sequence: CTT
cattgagtcttttggagctg

SEQ ID NO: 414844 - DNA, 20 bp, Artificial Sequence
  Description of Artificial Sequence: Synthetic oligonucleotide
  Target: LAMA2; (+) strand; PAM type: YTN; PAM sequence: TTC
attgagtcttttggagctgt

SEQ ID NO: 414845 - DNA, 20 bp, Artificial Sequence
  Description of Artificial Sequence: Synthetic oligonucleotide
  Target: LAMA2; (+) strand; PAM type: YTN; PAM sequence: TTG
agtcttttggagctgtaatt

SEQ ID NO: 414846 - DNA, 20 bp, Artificial Sequence
  Description of Artificial Sequence: Synthetic oligonucleotide
  Target: LAMA2; (+) strand; PAM type: YTN; PAM sequence: CTT
ttggagctgtaatttgacct

SEQ ID NO: 414847 - DNA, 20 bp, Artificial Sequence
  Description of Artificial Sequence: Synthetic oligonucleotide
  Target: LAMA2; (+) strand; PAM type: YTN; PAM sequence: TTT
tggagctgtaatttgaccta

SEQ ID NO: 414848 - DNA, 20 bp, Artificial Sequence
  Description of Artificial Sequence: Synthetic oligonucleotide
  Target: LAMA2; (+) strand; PAM type: YTN; PAM sequence: TTT
ggagctgtaatttgacctaa

SEQ ID NO: 414849 - DNA, 20 bp, Artificial Sequence
  Description of Artificial Sequence: Synthetic oligonucleotide
  Target: LAMA2; (+) strand; PAM type: YTN; PAM sequence: TTG
gagctgtaatttgacctaac

SEQ ID NO: 414850 - DNA, 20 bp, Artificial Sequence
  Description of Artificial Sequence: Synthetic oligonucleotide
  Target: LAMA2; (+) strand; PAM type: YTN; PAM sequence: CTG
taatttgacctaacaaattc

SEQ ID NO: 414851 - DNA, 20 bp, Artificial Sequence
  Description of Artificial Sequence: Synthetic oligonucleotide
  Target: LAMA2; (+) strand; PAM type: YTN; PAM sequence: TTT
gacctaacaaattcattttc

SEQ ID NO: 414852 - DNA, 20 bp, Artificial Sequence
  Description of Artificial Sequence: Synthetic oligonucleotide
  Target: LAMA2; (+) strand; PAM type: YTN; PAM sequence: TTG
acctaacaaattcattttct

SEQ ID NO: 414853 - DNA, 20 bp, Artificial Sequence
  Description of Artificial Sequence: Synthetic oligonucleotide
  Target: LAMA2; (+) strand; PAM type: YTN; PAM sequence: CTA
acaaattcattttctataaa

SEQ ID NO: 414854 - DNA, 20 bp, Artificial Sequence
  Description of Artificial Sequence: Synthetic oligonucleotide
  Target: LAMA2; (+) strand; PAM type: YTN; PAM sequence: TTC
attttctataaacgttctgt

SEQ ID NO: 414855 - DNA, 20 bp, Artificial Sequence
  Description of Artificial Sequence: Synthetic oligonucleotide
  Target: LAMA2; (+) strand; PAM type: YTN; PAM sequence: TTT
tctataaacgttctgtgttt

SEQ ID NO: 414856 - DNA, 20 bp, Artificial Sequence
  Description of Artificial Sequence: Synthetic oligonucleotide
  Target: LAMA2; (+) strand; PAM type: YTN; PAM sequence: TTT
ctataaacgttctgtgtttt

SEQ ID NO: 414857 - DNA, 20 bp, Artificial Sequence
  Description of Artificial Sequence: Synthetic oligonucleotide
  Target: LAMA2; (+) strand; PAM type: YTN; PAM sequence: TTC
tataaacgttctgtgttttg

SEQ ID NO: 414858 - DNA, 20 bp, Artificial Sequence
  Description of Artificial Sequence: Synthetic oligonucleotide
  Target: LAMA2; (+) strand; PAM type: YTN; PAM sequence: CTA
taaacgttctgtgttttgtt

SEQ ID NO: 414859 - DNA, 20 bp, Artificial Sequence
  Description of Artificial Sequence: Synthetic oligonucleotide
  Target: LAMA2; (+) strand; PAM type: YTN; PAM sequence: TTC
tgtgttttgttctcctttaa

SEQ ID NO: 414860 - DNA, 20 bp, Artificial Sequence
  Description of Artificial Sequence: Synthetic oligonucleotide
  Target: LAMA2; (+) strand; PAM type: YTN; PAM sequence: CTG
tgttttgttctcctttaacc

SEQ ID NO: 414861 - DNA, 20 bp, Artificial Sequence
  Description of Artificial Sequence: Synthetic oligonucleotide
  Target: LAMA2; (+) strand; PAM type: YTN; PAM sequence: TTT
tgttctcctttaacccatga

SEQ ID NO: 414862 - DNA, 20 bp, Artificial Sequence
  Description of Artificial Sequence: Synthetic oligonucleotide
  Target: LAMA2; (+) strand; PAM type: YTN; PAM sequence: TTT
gttctcctttaacccatgat

SEQ ID NO: 414863 - DNA, 20 bp, Artificial Sequence
  Description of Artificial Sequence: Synthetic oligonucleotide
  Target: LAMA2; (+) strand; PAM type: YTN; PAM sequence: TTG
ttctcctttaacccatgatt

SEQ ID NO: 414864 - DNA, 20 bp, Artificial Sequence
  Description of Artificial Sequence: Synthetic oligonucleotide
  Target: LAMA2; (+) strand; PAM type: YTN; PAM sequence: TTC
tcctttaacccatgatttca

SEQ ID NO: 414865 - DNA, 20 bp, Artificial Sequence
  Description of Artificial Sequence: Synthetic oligonucleotide
  Target: LAMA2; (+) strand; PAM type: YTN; PAM sequence: CTC
ctttaacccatgatttcagt

SEQ ID NO: 414866 - DNA, 20 bp, Artificial Sequence
  Description of Artificial Sequence: Synthetic oligonucleotide
  Target: LAMA2; (+) strand; PAM type: YTN; PAM sequence: CTT
taacccatgatttcagtcat

SEQ ID NO: 414867 - DNA, 20 bp, Artificial Sequence
  Description of Artificial Sequence: Synthetic oligonucleotide
  Target: LAMA2; (+) strand; PAM type: YTN; PAM sequence: TTT
aacccatgatttcagtcatc

SEQ ID NO: 414868 - DNA, 20 bp, Artificial Sequence
  Description of Artificial Sequence: Synthetic oligonucleotide
  Target: LAMA2; (+) strand; PAM type: YTN; PAM sequence: TTA
acccatgatttcagtcatct

SEQ ID NO: 414869 - DNA, 20 bp, Artificial Sequence
  Description of Artificial Sequence: Synthetic oligonucleotide
  Target: LAMA2; (+) strand; PAM type: YTN; PAM sequence: TTT
cagtcatcttcaaagagctc

SEQ ID NO: 414870 - DNA, 20 bp, Artificial Sequence
  Description of Artificial Sequence: Synthetic oligonucleotide
  Target: LAMA2; (+) strand; PAM type: YTN; PAM sequence: TTC
agtcatcttcaaagagctct

SEQ ID NO: 414871 - DNA, 20 bp, Artificial Sequence
  Description of Artificial Sequence: Synthetic oligonucleotide
  Target: LAMA2; (+) strand; PAM type: YTN; PAM sequence: CTT
caaagagctctgtgagaaga

SEQ ID NO: 414872 - DNA, 20 bp, Artificial Sequence
  Description of Artificial Sequence: Synthetic oligonucleotide
  Target: LAMA2; (+) strand; PAM type: YTN; PAM sequence: TTC
aaagagctctgtgagaagac

SEQ ID NO: 414873 - DNA, 20 bp, Artificial Sequence
  Description of Artificial Sequence: Synthetic oligonucleotide
  Target: LAMA2; (+) strand; PAM type: YTN; PAM sequence: CTC
tgtgagaagactggccttga

SEQ ID NO: 414874 - DNA, 20 bp, Artificial Sequence
  Description of Artificial Sequence: Synthetic oligonucleotide
  Target: LAMA2; (+) strand; PAM type: YTN; PAM sequence: CTG
tgagaagactggccttgatt

SEQ ID NO: 414875 - DNA, 20 bp, Artificial Sequence
  Description of Artificial Sequence: Synthetic oligonucleotide
  Target: LAMA2; (+) strand; PAM type: YTN; PAM sequence: CTG
gccttgattttattcaccag

SEQ ID NO: 414876 - DNA, 20 bp, Artificial Sequence
  Description of Artificial Sequence: Synthetic oligonucleotide
  Target: LAMA2; (+) strand; PAM type: YTN; PAM sequence: CTT
gattttattcaccagcttaa

SEQ ID NO: 414877 - DNA, 20 bp, Artificial Sequence
  Description of Artificial Sequence: Synthetic oligonucleotide
  Target: LAMA2; (+) strand; PAM type: YTN; PAM sequence: TTG
attttattcaccagcttaaa

SEQ ID NO: 414878 - DNA, 20 bp, Artificial Sequence
  Description of Artificial Sequence: Synthetic oligonucleotide
  Target: LAMA2; (+) strand; PAM type: YTN; PAM sequence: TTT
tattcaccagcttaaaaagg

SEQ ID NO: 414879 - DNA, 20 bp, Artificial Sequence
  Description of Artificial Sequence: Synthetic oligonucleotide
  Target: LAMA2; (+) strand; PAM type: YTN; PAM sequence: TTT
attcaccagcttaaaaagga

SEQ ID NO: 414880 - DNA, 20 bp, Artificial Sequence
  Description of Artificial Sequence: Synthetic oligonucleotide
  Target: LAMA2; (+) strand; PAM type: YTN; PAM sequence: TTA
ttcaccagcttaaaaaggaa

SEQ ID NO: 414881 - DNA, 20 bp, Artificial Sequence
  Description of Artificial Sequence: Synthetic oligonucleotide
  Target: LAMA2; (+) strand; PAM type: YTN; PAM sequence: TTC
accagcttaaaaaggaaacg

SEQ ID NO: 414882 - DNA, 20 bp, Artificial Sequence
  Description of Artificial Sequence: Synthetic oligonucleotide
  Target: LAMA2; (+) strand; PAM type: YTN; PAM sequence: CTT
aaaaaggaaacgtttcattt

SEQ ID NO: 414883 - DNA, 20 bp, Artificial Sequence
  Description of Artificial Sequence: Synthetic oligonucleotide
  Target: LAMA2; (+) strand; PAM type: YTN; PAM sequence: TTA
aaaaggaaacgtttcatttg

SEQ ID NO: 414884 - DNA, 20 bp, Artificial Sequence
  Description of Artificial Sequence: Synthetic oligonucleotide
  Target: LAMA2; (+) strand; PAM type: YTN; PAM sequence: TTT
catttgccatctttagtaga

SEQ ID NO: 414885 - DNA, 20 bp, Artificial Sequence
  Description of Artificial Sequence: Synthetic oligonucleotide
  Target: LAMA2; (+) strand; PAM type: YTN; PAM sequence: TTC
atttgccatctttagtagac

SEQ ID NO: 414886 - DNA, 20 bp, Artificial Sequence
  Description of Artificial Sequence: Synthetic oligonucleotide
  Target: LAMA2; (+) strand; PAM type: YTN; PAM sequence: TTT
gccatctttagtagacaatg

SEQ ID NO: 414887 - DNA, 20 bp, Artificial Sequence
  Description of Artificial Sequence: Synthetic oligonucleotide
  Target: LAMA2; (+) strand; PAM type: YTN; PAM sequence: TTG
ccatctttagtagacaatgg

SEQ ID NO: 414888 - DNA, 20 bp, Artificial Sequence
  Description of Artificial Sequence: Synthetic oligonucleotide
  Target: LAMA2; (+) strand; PAM type: YTN; PAM sequence: CTT
tagtagacaatggttgcagt

SEQ ID NO: 414889 - DNA, 20 bp, Artificial Sequence
  Description of Artificial Sequence: Synthetic oligonucleotide
  Target: LAMA2; (+) strand; PAM type: YTN; PAM sequence: TTT
agtagacaatggttgcagtc

SEQ ID NO: 414890 - DNA, 20 bp, Artificial Sequence
  Description of Artificial Sequence: Synthetic oligonucleotide
  Target: LAMA2; (+) strand; PAM type: YTN; PAM sequence: TTA
gtagacaatggttgcagtct

SEQ ID NO: 414891 - DNA, 20 bp, Artificial Sequence
  Description of Artificial Sequence: Synthetic oligonucleotide
  Target: LAMA2; (+) strand; PAM type: YTN; PAM sequence: TTG
cagtctaataattcagaaca

SEQ ID NO: 414892 - DNA, 20 bp, Artificial Sequence
  Description of Artificial Sequence: Synthetic oligonucleotide
  Target: LAMA2; (+) strand; PAM type: YTN; PAM sequence: CTA
ataattcagaacatgtaaaa

SEQ ID NO: 414893 - DNA, 20 bp, Artificial Sequence
  Description of Artificial Sequence: Synthetic oligonucleotide
  Target: LAMA2; (+) strand; PAM type: YTN; PAM sequence: TTC
agaacatgtaaaagaacagg

SEQ ID NO: 414894 - DNA, 20 bp, Artificial Sequence
  Description of Artificial Sequence: Synthetic oligonucleotide
  Target: LAMA2; (+) strand; PAM type: YTN; PAM sequence: CTC
ctttctcctatggaaatttt

SEQ ID NO: 414895 - DNA, 20 bp, Artificial Sequence
  Description of Artificial Sequence: Synthetic oligonucleotide
  Target: LAMA2; (+) strand; PAM type: YTN; PAM sequence: CTT
tctcctatggaaattttagc

SEQ ID NO: 414896 - DNA, 20 bp, Artificial Sequence
  Description of Artificial Sequence: Synthetic oligonucleotide
  Target: LAMA2; (+) strand; PAM type: YTN; PAM sequence: TTT
ctcctatggaaattttagca

SEQ ID NO: 414897 - DNA, 20 bp, Artificial Sequence
  Description of Artificial Sequence: Synthetic oligonucleotide
  Target: LAMA2; (+) strand; PAM type: YTN; PAM sequence: TTC
tcctatggaaattttagcaa

SEQ ID NO: 414898 - DNA, 20 bp, Artificial Sequence
  Description of Artificial Sequence: Synthetic oligonucleotide
  Target: LAMA2; (+) strand; PAM type: YTN; PAM sequence: CTC
ctatggaaattttagcaaca

SEQ ID NO: 414899 - DNA, 20 bp, Artificial Sequence
  Description of Artificial Sequence: Synthetic oligonucleotide
  Target: LAMA2; (+) strand; PAM type: YTN; PAM sequence: CTA
tggaaattttagcaacaaag

SEQ ID NO: 414900 - DNA, 20 bp, Artificial Sequence
  Description of Artificial Sequence: Synthetic oligonucleotide
  Target: LAMA2; (+) strand; PAM type: YTN; PAM sequence: TTT
tagcaacaaagaataatcct

SEQ ID NO: 414901 - DNA, 20 bp, Artificial Sequence
  Description of Artificial Sequence: Synthetic oligonucleotide
  Target: LAMA2; (+) strand; PAM type: YTN; PAM sequence: TTT
agcaacaaagaataatcctc

SEQ ID NO: 414902 - DNA, 20 bp, Artificial Sequence
  Description of Artificial Sequence: Synthetic oligonucleotide
  Target: LAMA2; (+) strand; PAM type: YTN; PAM sequence: TTA
gcaacaaagaataatcctct

SEQ ID NO: 414903 - DNA, 20 bp, Artificial Sequence
  Description of Artificial Sequence: Synthetic oligonucleotide
  Target: LAMA2; (+) strand; PAM type: YTN; PAM sequence: CTC
tctgacaatgttgttatcca

SEQ ID NO: 414904 - DNA, 20 bp, Artificial Sequence
  Description of Artificial Sequence: Synthetic oligonucleotide
  Target: LAMA2; (+) strand; PAM type: YTN; PAM sequence: CTC
tgacaatgttgttatccact

SEQ ID NO: 414905 - DNA, 20 bp, Artificial Sequence
  Description of Artificial Sequence: Synthetic oligonucleotide
  Target: LAMA2; (+) strand; PAM type: YTN; PAM sequence: CTG
acaatgttgttatccactag

SEQ ID NO: 414906 - DNA, 20 bp, Artificial Sequence
  Description of Artificial Sequence: Synthetic oligonucleotide
  Target: LAMA2; (+) strand; PAM type: YTN; PAM sequence: TTG
ttatccactaggggaaggaa

SEQ ID NO: 414907 - DNA, 20 bp, Artificial Sequence
  Description of Artificial Sequence: Synthetic oligonucleotide
  Target: LAMA2; (+) strand; PAM type: YTN; PAM sequence: TTA
tccactaggggaaggaaggt

SEQ ID NO: 414908 - DNA, 20 bp, Artificial Sequence
  Description of Artificial Sequence: Synthetic oligonucleotide
  Target: LAMA2; (+) strand; PAM type: YTN; PAM sequence: CTA
ggggaaggaaggtgctgttt

SEQ ID NO: 414909 - DNA, 20 bp, Artificial Sequence
  Description of Artificial Sequence: Synthetic oligonucleotide
  Target: LAMA2; (+) strand; PAM type: YTN; PAM sequence: CTG
tttccaattgaggtgatggc

SEQ ID NO: 414910 - DNA, 20 bp, Artificial Sequence
  Description of Artificial Sequence: Synthetic oligonucleotide
  Target: LAMA2; (+) strand; PAM type: YTN; PAM sequence: TTT
ccaattgaggtgatggctga

SEQ ID NO: 414911 - DNA, 20 bp, Artificial Sequence
  Description of Artificial Sequence: Synthetic oligonucleotide
  Target: LAMA2; (+) strand; PAM type: YTN; PAM sequence: TTC
caattgaggtgatggctgac

SEQ ID NO: 414912 - DNA, 20 bp, Artificial Sequence
  Description of Artificial Sequence: Synthetic oligonucleotide
  Target: LAMA2; (+) strand; PAM type: YTN; PAM sequence: TTG
aggtgatggctgacatactc

SEQ ID NO: 414913 - DNA, 20 bp, Artificial Sequence
  Description of Artificial Sequence: Synthetic oligonucleotide
  Target: LAMA2; (+) strand; PAM type: YTN; PAM sequence: CTG
acatactcactatttcacca

SEQ ID NO: 414914 - DNA, 20 bp, Artificial Sequence
  Description of Artificial Sequence: Synthetic oligonucleotide
  Target: LAMA2; (+) strand; PAM type: YTN; PAM sequence: CTC
actatttcaccaccgtcctg

SEQ ID NO: 414915 - DNA, 20 bp, Artificial Sequence
  Description of Artificial Sequence: Synthetic oligonucleotide
  Target: LAMA2; (+) strand; PAM type: YTN; PAM sequence: CTA
tttcaccaccgtcctgttgc

SEQ ID NO: 414916 - DNA, 20 bp, Artificial Sequence
  Description of Artificial Sequence: Synthetic oligonucleotide
  Target: LAMA2; (+) strand; PAM type: YTN; PAM sequence: TTT
caccaccgtcctgttgctta

SEQ ID NO: 414917 - DNA, 20 bp, Artificial Sequence
  Description of Artificial Sequence: Synthetic oligonucleotide
  Target: LAMA2; (+) strand; PAM type: YTN; PAM sequence: TTC
accaccgtcctgttgcttaa

SEQ ID NO: 414918 - DNA, 20 bp, Artificial Sequence
  Description of Artificial Sequence: Synthetic oligonucleotide
  Target: LAMA2; (+) strand; PAM type: YTN; PAM sequence: CTG
ttgcttaatacaatttgtac

SEQ ID NO: 414919 - DNA, 20 bp, Artificial Sequence
  Description of Artificial Sequence: Synthetic oligonucleotide
  Target: LAMA2; (+) strand; PAM type: YTN; PAM sequence: TTG
cttaatacaatttgtacaca

SEQ ID NO: 414920 - DNA, 20 bp, Artificial Sequence
  Description of Artificial Sequence: Synthetic oligonucleotide
  Target: LAMA2; (+) strand; PAM type: YTN; PAM sequence: CTT
aatacaatttgtacacacaa

SEQ ID NO: 414921 - DNA, 20 bp, Artificial Sequence
  Description of Artificial Sequence: Synthetic oligonucleotide
  Target: LAMA2; (+) strand; PAM type: YTN; PAM sequence: TTA
atacaatttgtacacacaac

SEQ ID NO: 414922 - DNA, 20 bp, Artificial Sequence
  Description of Artificial Sequence: Synthetic oligonucleotide
  Target: LAMA2; (+) strand; PAM type: YTN; PAM sequence: TTT
gtacacacaactttattcta

SEQ ID NO: 414923 - DNA, 20 bp, Artificial Sequence
  Description of Artificial Sequence: Synthetic oligonucleotide
  Target: LAMA2; (+) strand; PAM type: YTN; PAM sequence: TTG
tacacacaactttattctac

SEQ ID NO: 414924 - DNA, 20 bp, Artificial Sequence
  Description of Artificial Sequence: Synthetic oligonucleotide
  Target: LAMA2; (+) strand; PAM type: YTN; PAM sequence: CTT
tattctacagaagcaattct

SEQ ID NO: 414925 - DNA, 20 bp, Artificial Sequence
  Description of Artificial Sequence: Synthetic oligonucleotide
  Target: LAMA2; (+) strand; PAM type: YTN; PAM sequence: TTT
attctacagaagcaattctc

SEQ ID NO: 414926 - DNA, 20 bp, Artificial Sequence
  Description of Artificial Sequence: Synthetic oligonucleotide
  Target: LAMA2; (+) strand; PAM type: YTN; PAM sequence: TTA
ttctacagaagcaattctca

SEQ ID NO: 414927 - DNA, 20 bp, Artificial Sequence
  Description of Artificial Sequence: Synthetic oligonucleotide
  Target: LAMA2; (+) strand; PAM type: YTN; PAM sequence: TTC
tacagaagcaattctcaagc

SEQ ID NO: 414928 - DNA, 20 bp, Artificial Sequence
  Description of Artificial Sequence: Synthetic oligonucleotide
  Target: LAMA2; (+) strand; PAM type: YTN; PAM sequence: CTA
cagaagcaattctcaagctt

SEQ ID NO: 414929 - DNA, 20 bp, Artificial Sequence
  Description of Artificial Sequence: Synthetic oligonucleotide
  Target: LAMA2; (+) strand; PAM type: YTN; PAM sequence: TTC
tcaagcttagctcagtgttt

SEQ ID NO: 414930 - DNA, 20 bp, Artificial Sequence
  Description of Artificial Sequence: Synthetic oligonucleotide
  Target: LAMA2; (+) strand; PAM type: YTN; PAM sequence: CTC
aagcttagctcagtgttttt

SEQ ID NO: 414931 - DNA, 20 bp, Artificial Sequence
  Description of Artificial Sequence: Synthetic oligonucleotide
  Target: LAMA2; (+) strand; PAM type: YTN; PAM sequence: CTT
agctcagtgtttttaaaaaa

SEQ ID NO: 414932 - DNA, 20 bp, Artificial Sequence
  Description of Artificial Sequence: Synthetic oligonucleotide
  Target: LAMA2; (+) strand; PAM type: YTN; PAM sequence: TTA
gctcagtgtttttaaaaaac

SEQ ID NO: 414933 - DNA, 20 bp, Artificial Sequence
  Description of Artificial Sequence: Synthetic oligonucleotide
  Target: LAMA2; (+) strand; PAM type: YTN; PAM sequence: CTC
agtgtttttaaaaaactgcc

SEQ ID NO: 414934 - DNA, 20 bp, Artificial Sequence
  Description of Artificial Sequence: Synthetic oligonucleotide
  Target: LAMA2; (+) strand; PAM type: YTN; PAM sequence: TTT
ttaaaaaactgcctatgctt

SEQ ID NO: 414935 - DNA, 20 bp, Artificial Sequence
  Description of Artificial Sequence: Synthetic oligonucleotide
  Target: LAMA2; (+) strand; PAM type: YTN; PAM sequence: TTT
taaaaaactgcctatgcttt

SEQ ID NO: 414936 - DNA, 20 bp, Artificial Sequence
  Description of Artificial Sequence: Synthetic oligonucleotide
  Target: LAMA2; (+) strand; PAM type: YTN; PAM sequence: TTT
aaaaaactgcctatgcttta

SEQ ID NO: 414937 - DNA, 20 bp, Artificial Sequence
  Description of Artificial Sequence: Synthetic oligonucleotide
  Target: LAMA2; (+) strand; PAM type: YTN; PAM sequence: TTA
aaaaactgcctatgctttag

SEQ ID NO: 414938 - DNA, 20 bp, Artificial Sequence
  Description of Artificial Sequence: Synthetic oligonucleotide
  Target: LAMA2; (+) strand; PAM type: YTN; PAM sequence: CTG
cctatgctttagaaaagtgc

SEQ ID NO: 414939 - DNA, 20 bp, Artificial Sequence
  Description of Artificial Sequence: Synthetic oligonucleotide
  Target: LAMA2; (+) strand; PAM type: YTN; PAM sequence: CTA
tgctttagaaaagtgcctag

SEQ ID NO: 414940 - DNA, 20 bp, Artificial Sequence
  Description of Artificial Sequence: Synthetic oligonucleotide
  Target: LAMA2; (+) strand; PAM type: YTN; PAM sequence: CTT
tagaaaagtgcctagggagt

SEQ ID NO: 414941 - DNA, 20 bp, Artificial Sequence
  Description of Artificial Sequence: Synthetic oligonucleotide
  Target: LAMA2; (+) strand; PAM type: YTN; PAM sequence: TTT
agaaaagtgcctagggagtt

SEQ ID NO: 414942 - DNA, 20 bp, Artificial Sequence
  Description of Artificial Sequence: Synthetic oligonucleotide
  Target: LAMA2; (+) strand; PAM type: YTN; PAM sequence: TTA
gaaaagtgcctagggagttt

SEQ ID NO: 414943 - DNA, 20 bp, Artificial Sequence
  Description of Artificial Sequence: Synthetic oligonucleotide
  Target: LAMA2; (+) strand; PAM type: YTN; PAM sequence: CTA
gggagtttttaaaaatctag

SEQ ID NO: 414944 - DNA, 20 bp, Artificial Sequence
  Description of Artificial Sequence: Synthetic oligonucleotide
  Target: LAMA2; (+) strand; PAM type: YTN; PAM sequence: TTT
ttaaaaatctagtacctggt

SEQ ID NO: 414945 - DNA, 20 bp, Artificial Sequence
  Description of Artificial Sequence: Synthetic oligonucleotide
  Target: LAMA2; (+) strand; PAM type: YTN; PAM sequence: TTT
taaaaatctagtacctggtc

SEQ ID NO: 414946 - DNA, 20 bp, Artificial Sequence
  Description of Artificial Sequence: Synthetic oligonucleotide
  Target: LAMA2; (+) strand; PAM type: YTN; PAM sequence: TTT
aaaaatctagtacctggtcc

SEQ ID NO: 414947 - DNA, 20 bp, Artificial Sequence
  Description of Artificial Sequence: Synthetic oligonucleotide
  Target: LAMA2; (+) strand; PAM type: YTN; PAM sequence: TTA
aaaatctagtacctggtcca

SEQ ID NO: 414948 - DNA, 20 bp, Artificial Sequence
  Description of Artificial Sequence: Synthetic oligonucleotide
  Target: LAMA2; (+) strand; PAM type: YTN; PAM sequence: CTA
gtacctggtccagtgattct

SEQ ID NO: 414949 - DNA, 20 bp, Artificial Sequence
  Description of Artificial Sequence: Synthetic oligonucleotide
  Target: LAMA2; (+) strand; PAM type: YTN; PAM sequence: CTG
gtccagtgattctgattttg

SEQ ID NO: 414950 - DNA, 20 bp, Artificial Sequence
  Description of Artificial Sequence: Synthetic oligonucleotide
  Target: LAMA2; (+) strand; PAM type: YTN; PAM sequence: TTC
tgattttgtctaggacatag

SEQ ID NO: 414951 - DNA, 20 bp, Artificial Sequence
  Description of Artificial Sequence: Synthetic oligonucleotide
  Target: LAMA2; (+) strand; PAM type: YTN; PAM sequence: CTG
attttgtctaggacatagcc

SEQ ID NO: 414952 - DNA, 20 bp, Artificial Sequence
  Description of Artificial Sequence: Synthetic oligonucleotide
  Target: LAMA2; (+) strand; PAM type: YTN; PAM sequence: TTT
tgtctaggacatagccagag

SEQ ID NO: 414953 - DNA, 20 bp, Artificial Sequence
  Description of Artificial Sequence: Synthetic oligonucleotide
  Target: LAMA2; (+) strand; PAM type: YTN; PAM sequence: TTT
gtctaggacatagccagagc

SEQ ID NO: 414954 - DNA, 20 bp, Artificial Sequence
  Description of Artificial Sequence: Synthetic oligonucleotide
  Target: LAMA2; (+) strand; PAM type: YTN; PAM sequence: TTG
tctaggacatagccagagca

SEQ ID NO: 414955 - DNA, 20 bp, Artificial Sequence
  Description of Artificial Sequence: Synthetic oligonucleotide
  Target: LAMA2; (+) strand; PAM type: YTN; PAM sequence: CTA
ggacatagccagagcataat

SEQ ID NO: 414956 - DNA, 20 bp, Artificial Sequence
  Description of Artificial Sequence: Synthetic oligonucleotide
  Target: LAMA2; (+) strand; PAM type: YTN; PAM sequence: TTT
tttttttttttgagacaggg

SEQ ID NO: 414957 - DNA, 20 bp, Artificial Sequence
  Description of Artificial Sequence: Synthetic oligonucleotide
  Target: LAMA2; (+) strand; PAM type: YTN; PAM sequence: TTT
ttttttttttgagacagggt

SEQ ID NO: 414958 - DNA, 20 bp, Artificial Sequence
  Description of Artificial Sequence: Synthetic oligonucleotide
  Target: LAMA2; (+) strand; PAM type: YTN; PAM sequence: TTT
tttttttttgagacagggtc

SEQ ID NO: 414959 - DNA, 20 bp, Artificial Sequence
  Description of Artificial Sequence: Synthetic oligonucleotide
  Target: LAMA2; (+) strand; PAM type: YTN; PAM sequence: TTT
ttttttttgagacagggtct

SEQ ID NO: 414960 - DNA, 20 bp, Artificial Sequence
  Description of Artificial Sequence: Synthetic oligonucleotide
  Target: LAMA2; (+) strand; PAM type: YTN; PAM sequence: TTT
tttttttgagacagggtctc

SEQ ID NO: 414961 - DNA, 20 bp, Artificial Sequence
  Description of Artificial Sequence: Synthetic oligonucleotide
  Target: LAMA2; (+) strand; PAM type: YTN; PAM sequence: TTT
ttttttgagacagggtctca

SEQ ID NO: 414962 - DNA, 20 bp, Artificial Sequence
  Description of Artificial Sequence: Synthetic oligonucleotide
  Target: LAMA2; (+) strand; PAM type: YTN; PAM sequence: TTT
tttttgagacagggtctcat

SEQ ID NO: 414963 - DNA, 20 bp, Artificial Sequence
  Description of Artificial Sequence: Synthetic oligonucleotide
  Target: LAMA2; (+) strand; PAM type: YTN; PAM sequence: TTT
ttttgagacagggtctcatg

SEQ ID NO: 414964 - DNA, 20 bp, Artificial Sequence
  Description of Artificial Sequence: Synthetic oligonucleotide
  Target: LAMA2; (+) strand; PAM type: YTN; PAM sequence: TTT
tttgagacagggtctcatgt

SEQ ID NO: 414965 - DNA, 20 bp, Artificial Sequence
  Description of Artificial Sequence: Synthetic oligonucleotide
  Target: LAMA2; (+) strand; PAM type: YTN; PAM sequence: TTT
ttgagacagggtctcatgtt

SEQ ID NO: 414966 - DNA, 20 bp, Artificial Sequence
  Description of Artificial Sequence: Synthetic oligonucleotide
  Target: LAMA2; (+) strand; PAM type: YTN; PAM sequence: TTT
tgagacagggtctcatgttg

SEQ ID NO: 414967 - DNA, 20 bp, Artificial Sequence
  Description of Artificial Sequence: Synthetic oligonucleotide
  Target: LAMA2; (+) strand; PAM type: YTN; PAM sequence: TTT
gagacagggtctcatgttgt

SEQ ID NO: 414968 - DNA, 20 bp, Artificial Sequence
  Description of Artificial Sequence: Synthetic oligonucleotide
  Target: LAMA2; (+) strand; PAM type: YTN; PAM sequence: TTG
agacagggtctcatgttgtc

SEQ ID NO: 414969 - DNA, 20 bp, Artificial Sequence
  Description of Artificial Sequence: Synthetic oligonucleotide
  Target: LAMA2; (+) strand; PAM type: YTN; PAM sequence: CTC
atgttgtcacccaggcagga

SEQ ID NO: 414970 - DNA, 20 bp, Artificial Sequence
  Description of Artificial Sequence: Synthetic oligonucleotide
  Target: LAMA2; (+) strand; PAM type: YTN; PAM sequence: TTG
tcacccaggcaggagtgcaa

SEQ ID NO: 414971 - DNA, 20 bp, Artificial Sequence
  Description of Artificial Sequence: Synthetic oligonucleotide
  Target: LAMA2; (+) strand; PAM type: YTN; PAM sequence: CTT
ggctcactgcagcctcaacc

SEQ ID NO: 414972 - DNA, 20 bp, Artificial Sequence
  Description of Artificial Sequence: Synthetic oligonucleotide
  Target: LAMA2; (+) strand; PAM type: YTN; PAM sequence: TTG
gctcactgcagcctcaacct

SEQ ID NO: 414973 - DNA, 20 bp, Artificial Sequence
  Description of Artificial Sequence: Synthetic oligonucleotide
  Target: LAMA2; (+) strand; PAM type: YTN; PAM sequence: CTC
actgcagcctcaacctcccc

SEQ ID NO: 414974 - DNA, 20 bp, Artificial Sequence
  Description of Artificial Sequence: Synthetic oligonucleotide
  Target: LAMA2; (+) strand; PAM type: YTN; PAM sequence: CTG
cagcctcaacctccccagtt

SEQ ID NO: 414975 - DNA, 20 bp, Artificial Sequence
  Description of Artificial Sequence: Synthetic oligonucleotide
  Target: LAMA2; (+) strand; PAM type: YTN; PAM sequence: CTC
aacctccccagttcaagtga

SEQ ID NO: 414976 - DNA, 20 bp, Artificial Sequence
  Description of Artificial Sequence: Synthetic oligonucleotide
  Target: LAMA2; (+) strand; PAM type: YTN; PAM sequence: CTC
cccagttcaagtgatcctcc

SEQ ID NO: 414977 - DNA, 20 bp, Artificial Sequence
  Description of Artificial Sequence: Synthetic oligonucleotide
  Target: LAMA2; (+) strand; PAM type: YTN; PAM sequence: TTC
aagtgatcctcctgcctcac

SEQ ID NO: 414978 - DNA, 20 bp, Artificial Sequence
  Description of Artificial Sequence: Synthetic oligonucleotide
  Target: LAMA2; (+) strand; PAM type: YTN; PAM sequence: CTC
ctgcctcactccccaagtag

SEQ ID NO: 414979 - DNA, 20 bp, Artificial Sequence
  Description of Artificial Sequence: Synthetic oligonucleotide
  Target: LAMA2; (+) strand; PAM type: YTN; PAM sequence: CTG
cctcactccccaagtagctg

SEQ ID NO: 414980 - DNA, 20 bp, Artificial Sequence
  Description of Artificial Sequence: Synthetic oligonucleotide
  Target: LAMA2; (+) strand; PAM type: YTN; PAM sequence: CTC
actccccaagtagctgggac

SEQ ID NO: 414981 - DNA, 20 bp, Artificial Sequence
  Description of Artificial Sequence: Synthetic oligonucleotide
  Target: LAMA2; (+) strand; PAM type: YTN; PAM sequence: CTC
cccaagtagctgggactaca

SEQ ID NO: 414982 - DNA, 20 bp, Artificial Sequence
  Description of Artificial Sequence: Synthetic oligonucleotide
  Target: LAMA2; (+) strand; PAM type: YTN; PAM sequence: CTG
ggactacaggtgggcaccac

SEQ ID NO: 414983 - DNA, 20 bp, Artificial Sequence
  Description of Artificial Sequence: Synthetic oligonucleotide
  Target: LAMA2; (+) strand; PAM type: YTN; PAM sequence: CTA
caggtgggcaccaccacacc

SEQ ID NO: 414984 - DNA, 20 bp, Artificial Sequence
  Description of Artificial Sequence: Synthetic oligonucleotide
  Target: LAMA2; (+) strand; PAM type: YTN; PAM sequence: CTA
atttttatatttttagtaga

SEQ ID NO: 414985 - DNA, 20 bp, Artificial Sequence
  Description of Artificial Sequence: Synthetic oligonucleotide
  Target: LAMA2; (+) strand; PAM type: YTN; PAM sequence: TTT
ttatatttttagtagagatg

SEQ ID NO: 414986 - DNA, 20 bp, Artificial Sequence
  Description of Artificial Sequence: Synthetic oligonucleotide
  Target: LAMA2; (+) strand; PAM type: YTN; PAM sequence: TTT
tatatttttagtagagatgg

SEQ ID NO: 414987 - DNA, 20 bp, Artificial Sequence
  Description of Artificial Sequence: Synthetic oligonucleotide
  Target: LAMA2; (+) strand; PAM type: YTN; PAM sequence: TTT
atatttttagtagagatggg

SEQ ID NO: 414988 - DNA, 20 bp, Artificial Sequence
  Description of Artificial Sequence: Synthetic oligonucleotide
  Target: LAMA2; (+) strand; PAM type: YTN; PAM sequence: TTA
tatttttagtagagatgggt

SEQ ID NO: 414989 - DNA, 20 bp, Artificial Sequence
  Description of Artificial Sequence: Synthetic oligonucleotide
  Target: LAMA2; (+) strand; PAM type: YTN; PAM sequence: TTT
ttagtagagatgggtttcac

SEQ ID NO: 414990 - DNA, 20 bp, Artificial Sequence
  Description of Artificial Sequence: Synthetic oligonucleotide
  Target: LAMA2; (+) strand; PAM type: YTN; PAM sequence: TTT
tagtagagatgggtttcacc

SEQ ID NO: 414991 - DNA, 20 bp, Artificial Sequence
  Description of Artificial Sequence: Synthetic oligonucleotide
  Target: LAMA2; (+) strand; PAM type: YTN; PAM sequence: TTT
agtagagatgggtttcacca

SEQ ID NO: 414992 - DNA, 20 bp, Artificial Sequence
  Description of Artificial Sequence: Synthetic oligonucleotide
  Target: LAMA2; (+) strand; PAM type: YTN; PAM sequence: TTA
gtagagatgggtttcaccat

SEQ ID NO: 414993 - DNA, 20 bp, Artificial Sequence
  Description of Artificial Sequence: Synthetic oligonucleotide
  Target: LAMA2; (+) strand; PAM type: YTN; PAM sequence: TTT
caccatgttgcccaggctgg

SEQ ID NO: 414994 - DNA, 20 bp, Artificial Sequence
  Description of Artificial Sequence: Synthetic oligonucleotide
  Target: LAMA2; (+) strand; PAM type: YTN; PAM sequence: TTC
accatgttgcccaggctggt

SEQ ID NO: 414995 - DNA, 20 bp, Artificial Sequence
  Description of Artificial Sequence: Synthetic oligonucleotide
  Target: LAMA2; (+) strand; PAM type: YTN; PAM sequence: TTG
cccaggctggtctcgaactc

SEQ ID NO: 414996 - DNA, 20 bp, Artificial Sequence
  Description of Artificial Sequence: Synthetic oligonucleotide
  Target: LAMA2; (+) strand; PAM type: YTN; PAM sequence: CTG
gtctcgaactcctgagctca

SEQ ID NO: 414997 - DNA, 20 bp, Artificial Sequence
  Description of Artificial Sequence: Synthetic oligonucleotide
  Target: LAMA2; (+) strand; PAM type: YTN; PAM sequence: CTC
gaactcctgagctcaagaaa

SEQ ID NO: 414998 - DNA, 20 bp, Artificial Sequence
  Description of Artificial Sequence: Synthetic oligonucleotide
  Target: LAMA2; (+) strand; PAM type: YTN; PAM sequence: CTC
ctgagctcaagaaatctgcc

SEQ ID NO: 414999 - DNA, 20 bp, Artificial Sequence
  Description of Artificial Sequence: Synthetic oligonucleotide
  Target: LAMA2; (+) strand; PAM type: YTN; PAM sequence: CTG
agctcaagaaatctgcctgc

SEQ ID NO: 415000 - DNA, 20 bp, Artificial Sequence
  Description of Artificial Sequence: Synthetic oligonucleotide
  Target: LAMA2; (+) strand; PAM type: YTN; PAM sequence: CTC
aagaaatctgcctgcctcag

SEQ ID NO: 415001 - DNA, 20 bp, Artificial Sequence
  Description of Artificial Sequence: Synthetic oligonucleotide
  Target: LAMA2; (+) strand; PAM type: YTN; PAM sequence: CTG
cctgcctcagcctcccaaag

SEQ ID NO: 415002 - DNA, 20 bp, Artificial Sequence
  Description of Artificial Sequence: Synthetic oligonucleotide
  Target: LAMA2; (+) strand; PAM type: YTN; PAM sequence: CTG
cctcagcctcccaaagtgct

SEQ ID NO: 415003 - DNA, 20 bp, Artificial Sequence
  Description of Artificial Sequence: Synthetic oligonucleotide
  Target: LAMA2; (+) strand; PAM type: YTN; PAM sequence: CTC
agcctcccaaagtgctagga

SEQ ID NO: 415004 - DNA, 20 bp, Artificial Sequence
  Description of Artificial Sequence: Synthetic oligonucleotide
  Target: LAMA2; (+) strand; PAM type: YTN; PAM sequence: CTC
ccaaagtgctaggattactg

SEQ ID NO: 415005 - DNA, 20 bp, Artificial Sequence
  Description of Artificial Sequence: Synthetic oligonucleotide
  Target: LAMA2; (+) strand; PAM type: YTN; PAM sequence: CTA
ggattactggcatgaaccac

SEQ ID NO: 415006 - DNA, 20 bp, Artificial Sequence
  Description of Artificial Sequence: Synthetic oligonucleotide
  Target: LAMA2; (+) strand; PAM type: YTN; PAM sequence: TTA
ctggcatgaaccactgtgcc

SEQ ID NO: 415007 - DNA, 20 bp, Artificial Sequence
  Description of Artificial Sequence: Synthetic oligonucleotide
  Target: LAMA2; (+) strand; PAM type: YTN; PAM sequence: CTG
gcatgaaccactgtgcccag

SEQ ID NO: 415008 - DNA, 20 bp, Artificial Sequence
  Description of Artificial Sequence: Synthetic oligonucleotide
  Target: LAMA2; (+) strand; PAM type: YTN; PAM sequence: CTG
tgcccagtcaagcatgagga

SEQ ID NO: 415009 - DNA, 20 bp, Artificial Sequence
  Description of Artificial Sequence: Synthetic oligonucleotide
  Target: LAMA2; (+) strand; PAM type: YTN; PAM sequence: TTC
ttaaaaacattcccaggcaa

SEQ ID NO: 415010 - DNA, 20 bp, Artificial Sequence
  Description of Artificial Sequence: Synthetic oligonucleotide
  Target: LAMA2; (+) strand; PAM type: YTN; PAM sequence: CTT
aaaaacattcccaggcaatt

SEQ ID NO: 415011 - DNA, 20 bp, Artificial Sequence
  Description of Artificial Sequence: Synthetic oligonucleotide
  Target: LAMA2; (+) strand; PAM type: YTN; PAM sequence: TTA
aaaacattcccaggcaattc

SEQ ID NO: 415012 - DNA, 20 bp, Artificial Sequence
  Description of Artificial Sequence: Synthetic oligonucleotide
  Target: LAMA2; (+) strand; PAM type: YTN; PAM sequence: TTC
ccaggcaattctaatgtgtt

SEQ ID NO: 415013 - DNA, 20 bp, Artificial Sequence
  Description of Artificial Sequence: Synthetic oligonucleotide
  Target: LAMA2; (+) strand; PAM type: YTN; PAM sequence: TTC
taatgtgttgtcaaggatga

SEQ ID NO: 415014 - DNA, 20 bp, Artificial Sequence
  Description of Artificial Sequence: Synthetic oligonucleotide
  Target: LAMA2; (+) strand; PAM type: YTN; PAM sequence: CTA
atgtgttgtcaaggatgaac

SEQ ID NO: 415015 - DNA, 20 bp, Artificial Sequence
  Description of Artificial Sequence: Synthetic oligonucleotide
  Target: LAMA2; (+) strand; PAM type: YTN; PAM sequence: TTG
tcaaggatgaacctaagaaa

SEQ ID NO: 415016 - DNA, 20 bp, Artificial Sequence
  Description of Artificial Sequence: Synthetic oligonucleotide
  Target: LAMA2; (+) strand; PAM type: YTN; PAM sequence: CTA
agaaaaataagcaataggga

SEQ ID NO: 415017 - DNA, 20 bp, Artificial Sequence
  Description of Artificial Sequence: Synthetic oligonucleotide
  Target: LAMA2; (+) strand; PAM type: YTN; PAM sequence: TTC
cctatttaataaatggtgct

SEQ ID NO: 415018 - DNA, 20 bp, Artificial Sequence
  Description of Artificial Sequence: Synthetic oligonucleotide
  Target: LAMA2; (+) strand; PAM type: YTN; PAM sequence: CTA
tttaataaatggtgctggga

SEQ ID NO: 415019 - DNA, 20 bp, Artificial Sequence
  Description of Artificial Sequence: Synthetic oligonucleotide
  Target: LAMA2; (+) strand; PAM type: YTN; PAM sequence: TTT
aataaatggtgctgggaaaa

SEQ ID NO: 415020 - DNA, 20 bp, Artificial Sequence
  Description of Artificial Sequence: Synthetic oligonucleotide
  Target: LAMA2; (+) strand; PAM type: YTN; PAM sequence: TTA
ataaatggtgctgggaaaac

SEQ ID NO: 415021 - DNA, 20 bp, Artificial Sequence
  Description of Artificial Sequence: Synthetic oligonucleotide
  Target: LAMA2; (+) strand; PAM type: YTN; PAM sequence: CTG
ggaaaactggcaagccataa

SEQ ID NO: 415022 - DNA, 20 bp, Artificial Sequence
  Description of Artificial Sequence: Synthetic oligonucleotide
  Target: LAMA2; (+) strand; PAM type: YTN; PAM sequence: CTG
gcaagccataagtagaaagc

SEQ ID NO: 415023 - DNA, 20 bp, Artificial Sequence
  Description of Artificial Sequence: Synthetic oligonucleotide
  Target: LAMA2; (+) strand; PAM type: YTN; PAM sequence: CTG
aaactggatcccttccttac

SEQ ID NO: 415024 - DNA, 20 bp, Artificial Sequence
  Description of Artificial Sequence: Synthetic oligonucleotide
  Target: LAMA2; (+) strand; PAM type: YTN; PAM sequence: CTG
gatcccttccttacacctta

SEQ ID NO: 415025 - DNA, 20 bp, Artificial Sequence
  Description of Artificial Sequence: Synthetic oligonucleotide
  Target: LAMA2; (+) strand; PAM type: YTN; PAM sequence: CTT
ccttacaccttatacaaaaa

SEQ ID NO: 415026 - DNA, 20 bp, Artificial Sequence
  Description of Artificial Sequence: Synthetic oligonucleotide
  Target: LAMA2; (+) strand; PAM type: YTN; PAM sequence: TTC
cttacaccttatacaaaaat

SEQ ID NO: 415027 - DNA, 20 bp, Artificial Sequence
  Description of Artificial Sequence: Synthetic oligonucleotide
  Target: LAMA2; (+) strand; PAM type: YTN; PAM sequence: CTT
acaccttatacaaaaattaa

SEQ ID NO: 415028 - DNA, 20 bp, Artificial Sequence
  Description of Artificial Sequence: Synthetic oligonucleotide
  Target: LAMA2; (+) strand; PAM type: YTN; PAM sequence: TTA
caccttatacaaaaattaat

SEQ ID NO: 415029 - DNA, 20 bp, Artificial Sequence
  Description of Artificial Sequence: Synthetic oligonucleotide
  Target: LAMA2; (+) strand; PAM type: YTN; PAM sequence: CTT
atacaaaaattaattcaaga

SEQ ID NO: 415030 - DNA, 20 bp, Artificial Sequence
  Description of Artificial Sequence: Synthetic oligonucleotide
  Target: LAMA2; (+) strand; PAM type: YTN; PAM sequence: TTA
tacaaaaattaattcaagat

SEQ ID NO: 415031 - DNA, 20 bp, Artificial Sequence
  Description of Artificial Sequence: Synthetic oligonucleotide
  Target: LAMA2; (+) strand; PAM type: YTN; PAM sequence: TTA
attcaagatggattaaagac

SEQ ID NO: 415032 - DNA, 20 bp, Artificial Sequence
  Description of Artificial Sequence: Synthetic oligonucleotide
  Target: LAMA2; (+) strand; PAM type: YTN; PAM sequence: TTC
aagatggattaaagacttaa

SEQ ID NO: 415033 - DNA, 20 bp, Artificial Sequence
  Description of Artificial Sequence: Synthetic oligonucleotide
  Target: LAMA2; (+) strand; PAM type: YTN; PAM sequence: TTA
aagacttaaacgttagacct

SEQ ID NO: 415034 - DNA, 20 bp, Artificial Sequence
  Description of Artificial Sequence: Synthetic oligonucleotide
  Target: LAMA2; (+) strand; PAM type: YTN; PAM sequence: CTT
aaacgttagacctaaaacca

SEQ ID NO: 415035 - DNA, 20 bp, Artificial Sequence
  Description of Artificial Sequence: Synthetic oligonucleotide
  Target: LAMA2; (+) strand; PAM type: YTN; PAM sequence: TTA
aacgttagacctaaaaccat

SEQ ID NO: 415036 - DNA, 20 bp, Artificial Sequence
  Description of Artificial Sequence: Synthetic oligonucleotide
  Target: LAMA2; (+) strand; PAM type: YTN; PAM sequence: TTA
gacctaaaaccatacaaacc

SEQ ID NO: 415037 - DNA, 20 bp, Artificial Sequence
  Description of Artificial Sequence: Synthetic oligonucleotide
  Target: LAMA2; (+) strand; PAM type: YTN; PAM sequence: CTA
aaaccatacaaaccctagaa

SEQ ID NO: 415038 - DNA, 20 bp, Artificial Sequence
  Description of Artificial Sequence: Synthetic oligonucleotide
  Target: LAMA2; (+) strand; PAM type: YTN; PAM sequence: CTA
gaagaaaacctaggcattac

SEQ ID NO: 415039 - DNA, 20 bp, Artificial Sequence
  Description of Artificial Sequence: Synthetic oligonucleotide
  Target: LAMA2; (+) strand; PAM type: YTN; PAM sequence: CTA
ggcattaccattcaggacat

SEQ ID NO: 415040 - DNA, 20 bp, Artificial Sequence
  Description of Artificial Sequence: Synthetic oligonucleotide
  Target: LAMA2; (+) strand; PAM type: YTN; PAM sequence: TTA
ccattcaggacataggcatg

SEQ ID NO: 415041 - DNA, 20 bp, Artificial Sequence
  Description of Artificial Sequence: Synthetic oligonucleotide
  Target: LAMA2; (+) strand; PAM type: YTN; PAM sequence: TTC
aggacataggcatgggcaag

SEQ ID NO: 415042 - DNA, 20 bp, Artificial Sequence
  Description of Artificial Sequence: Synthetic oligonucleotide
  Target: LAMA2; (+) strand; PAM type: YTN; PAM sequence: CTT
catgtctaaaacaccaaaag

SEQ ID NO: 415043 - DNA, 20 bp, Artificial Sequence
  Description of Artificial Sequence: Synthetic oligonucleotide
  Target: LAMA2; (+) strand; PAM type: YTN; PAM sequence: TTC
atgtctaaaacaccaaaagc

SEQ ID NO: 415044 - DNA, 20 bp, Artificial Sequence
  Description of Artificial Sequence: Synthetic oligonucleotide
  Target: LAMA2; (+) strand; PAM type: YTN; PAM sequence: CTA
aaacaccaaaagcaatggca

SEQ ID NO: 415045 - DNA, 20 bp, Artificial Sequence
  Description of Artificial Sequence: Synthetic oligonucleotide
  Target: LAMA2; (+) strand; PAM type: YTN; PAM sequence: TTG
acaaatgggatctaattaaa

SEQ ID NO: 415046 - DNA, 20 bp, Artificial Sequence
  Description of Artificial Sequence: Synthetic oligonucleotide
  Target: LAMA2; (+) strand; PAM type: YTN; PAM sequence: CTA
attaaactaaagagcttctg

SEQ ID NO: 415047 - DNA, 20 bp, Artificial Sequence
  Description of Artificial Sequence: Synthetic oligonucleotide
  Target: LAMA2; (+) strand; PAM type: YTN; PAM sequence: TTA
aactaaagagcttctgcaca

SEQ ID NO: 415048 - DNA, 20 bp, Artificial Sequence
  Description of Artificial Sequence: Synthetic oligonucleotide
  Target: LAMA2; (+) strand; PAM type: YTN; PAM sequence: CTA
aagagcttctgcacagcaaa

SEQ ID NO: 415049 - DNA, 20 bp, Artificial Sequence
  Description of Artificial Sequence: Synthetic oligonucleotide
  Target: LAMA2; (+) strand; PAM type: YTN; PAM sequence: CTT
ctgcacagcaaaagaaacta

SEQ ID NO: 415050 - DNA, 20 bp, Artificial Sequence
  Description of Artificial Sequence: Synthetic oligonucleotide
  Target: LAMA2; (+) strand; PAM type: YTN; PAM sequence: TTC
tgcacagcaaaagaaactac

SEQ ID NO: 415051 - DNA, 20 bp, Artificial Sequence
  Description of Artificial Sequence: Synthetic oligonucleotide
  Target: LAMA2; (+) strand; PAM type: YTN; PAM sequence: CTG
cacagcaaaagaaactacca

SEQ ID NO: 415052 - DNA, 20 bp, Artificial Sequence
  Description of Artificial Sequence: Synthetic oligonucleotide
  Target: LAMA2; (+) strand; PAM type: YTN; PAM sequence: CTA
ccagcagagcgaacaggcaa

SEQ ID NO: 415053 - DNA, 20 bp, Artificial Sequence
  Description of Artificial Sequence: Synthetic oligonucleotide
  Target: LAMA2; (+) strand; PAM type: YTN; PAM sequence: CTA
cagaatgggagaaaattttc

SEQ ID NO: 415054 - DNA, 20 bp, Artificial Sequence
  Description of Artificial Sequence: Synthetic oligonucleotide
  Target: LAMA2; (+) strand; PAM type: YTN; PAM sequence: TTT
tcgcaacctactcatctgac

SEQ ID NO: 415055 - DNA, 20 bp, Artificial Sequence
  Description of Artificial Sequence: Synthetic oligonucleotide
  Target: LAMA2; (+) strand; PAM type: YTN; PAM sequence: TTT
cgcaacctactcatctgaca

SEQ ID NO: 415056 - DNA, 20 bp, Artificial Sequence
  Description of Artificial Sequence: Synthetic oligonucleotide
  Target: LAMA2; (+) strand; PAM type: YTN; PAM sequence: TTC
gcaacctactcatctgacaa

SEQ ID NO: 415057 - DNA, 20 bp, Artificial Sequence
  Description of Artificial Sequence: Synthetic oligonucleotide
  Target: LAMA2; (+) strand; PAM type: YTN; PAM sequence: CTA
ctcatctgacaaagggctaa

SEQ ID NO: 415058 - DNA, 20 bp, Artificial Sequence
  Description of Artificial Sequence: Synthetic oligonucleotide
  Target: LAMA2; (+) strand; PAM type: YTN; PAM sequence: CTC
atctgacaaagggctaatat

SEQ ID NO: 415059 - DNA, 20 bp, Artificial Sequence
  Description of Artificial Sequence: Synthetic oligonucleotide
  Target: LAMA2; (+) strand; PAM type: YTN; PAM sequence: CTG
acaaagggctaatatccaga

SEQ ID NO: 415060 - DNA, 20 bp, Artificial Sequence
  Description of Artificial Sequence: Synthetic oligonucleotide
  Target: LAMA2; (+) strand; PAM type: YTN; PAM sequence: CTA
atatccagaatctacaatga

SEQ ID NO: 415061 - DNA, 20 bp, Artificial Sequence
  Description of Artificial Sequence: Synthetic oligonucleotide
  Target: LAMA2; (+) strand; PAM type: YTN; PAM sequence: CTA
caatgaactcaaacaaattt

SEQ ID NO: 415062 - DNA, 20 bp, Artificial Sequence
  Description of Artificial Sequence: Synthetic oligonucleotide
  Target: LAMA2; (+) strand; PAM type: YTN; PAM sequence: CTC
aaacaaatttacaagaaaaa

SEQ ID NO: 415063 - DNA, 20 bp, Artificial Sequence
  Description of Artificial Sequence: Synthetic oligonucleotide
  Target: LAMA2; (+) strand; PAM type: YTN; PAM sequence: TTT
acaagaaaaaaacaacccca

SEQ ID NO: 415064 - DNA, 20 bp, Artificial Sequence
  Description of Artificial Sequence: Synthetic oligonucleotide
  Target: LAMA2; (+) strand; PAM type: YTN; PAM sequence: TTA
caagaaaaaaacaaccccat

SEQ ID NO: 415065 - DNA, 20 bp, Artificial Sequence
  Description of Artificial Sequence: Synthetic oligonucleotide
  Target: LAMA2; (+) strand; PAM type: YTN; PAM sequence: CTT
ctcagaaggagacatttatg

SEQ ID NO: 415066 - DNA, 20 bp, Artificial Sequence
  Description of Artificial Sequence: Synthetic oligonucleotide
  Target: LAMA2; (+) strand; PAM type: YTN; PAM sequence: TTC
tcagaaggagacatttatgc

SEQ ID NO: 415067 - DNA, 20 bp, Artificial Sequence
  Description of Artificial Sequence: Synthetic oligonucleotide
  Target: LAMA2; (+) strand; PAM type: YTN; PAM sequence: CTC
agaaggagacatttatgcag

SEQ ID NO: 415068 - DNA, 20 bp, Artificial Sequence
  Description of Artificial Sequence: Synthetic oligonucleotide
  Target: LAMA2; (+) strand; PAM type: YTN; PAM sequence: TTT
atgcagccaaaagacacatg

SEQ ID NO: 415069 - DNA, 20 bp, Artificial Sequence
  Description of Artificial Sequence: Synthetic oligonucleotide
  Target: LAMA2; (+) strand; PAM type: YTN; PAM sequence: TTA
tgcagccaaaagacacatga

SEQ ID NO: 415070 - DNA, 20 bp, Artificial Sequence
  Description of Artificial Sequence: Synthetic oligonucleotide
  Target: LAMA2; (+) strand; PAM type: YTN; PAM sequence: CTC
atcatcactggccatcagag

SEQ ID NO: 415071 - DNA, 20 bp, Artificial Sequence
  Description of Artificial Sequence: Synthetic oligonucleotide
  Target: LAMA2; (+) strand; PAM type: YTN; PAM sequence: CTG
gccatcagagaaatgcaaat

SEQ ID NO: 415072 - DNA, 20 bp, Artificial Sequence
  Description of Artificial Sequence: Synthetic oligonucleotide
  Target: LAMA2; (+) strand; PAM type: YTN; PAM sequence: CTC
acaccagttagaatggcaat

SEQ ID NO: 415073 - DNA, 20 bp, Artificial Sequence
  Description of Artificial Sequence: Synthetic oligonucleotide
  Target: LAMA2; (+) strand; PAM type: YTN; PAM sequence: TTA
gaatggcaatcattaaaaag

SEQ ID NO: 415074 - DNA, 20 bp, Artificial Sequence
  Description of Artificial Sequence: Synthetic oligonucleotide
  Target: LAMA2; (+) strand; PAM type: YTN; PAM sequence: TTA
aaaagtcaggaaacaacagg

SEQ ID NO: 415075 - DNA, 20 bp, Artificial Sequence
  Description of Artificial Sequence: Synthetic oligonucleotide
  Target: LAMA2; (+) strand; PAM type: YTN; PAM sequence: CTG
gagaggatgtggagaaatag

SEQ ID NO: 415076 - DNA, 20 bp, Artificial Sequence
  Description of Artificial Sequence: Synthetic oligonucleotide
  Target: LAMA2; (+) strand; PAM type: YTN; PAM sequence: CTT
ttacactgttggtgggactg

SEQ ID NO: 415077 - DNA, 20 bp, Artificial Sequence
  Description of Artificial Sequence: Synthetic oligonucleotide
  Target: LAMA2; (+) strand; PAM type: YTN; PAM sequence: TTT
tacactgttggtgggactgt

SEQ ID NO: 415078 - DNA, 20 bp, Artificial Sequence
  Description of Artificial Sequence: Synthetic oligonucleotide
  Target: LAMA2; (+) strand; PAM type: YTN; PAM sequence: TTT
acactgttggtgggactgta

SEQ ID NO: 415079 - DNA, 20 bp, Artificial Sequence
  Description of Artificial Sequence: Synthetic oligonucleotide
  Target: LAMA2; (+) strand; PAM type: YTN; PAM sequence: TTA
cactgttggtgggactgtaa

SEQ ID NO: 415080 - DNA, 20 bp, Artificial Sequence
  Description of Artificial Sequence: Synthetic oligonucleotide
  Target: LAMA2; (+) strand; PAM type: YTN; PAM sequence: CTG
ttggtgggactgtaaactag

SEQ ID NO: 415081 - DNA, 20 bp, Artificial Sequence
  Description of Artificial Sequence: Synthetic oligonucleotide
  Target: LAMA2; (+) strand; PAM type: YTN; PAM sequence: TTG
gtgggactgtaaactagttc

SEQ ID NO: 415082 - DNA, 20 bp, Artificial Sequence
  Description of Artificial Sequence: Synthetic oligonucleotide
  Target: LAMA2; (+) strand; PAM type: YTN; PAM sequence: CTG
taaactagttcaaccattgt

SEQ ID NO: 415083 - DNA, 20 bp, Artificial Sequence
  Description of Artificial Sequence: Synthetic oligonucleotide
  Target: LAMA2; (+) strand; PAM type: YTN; PAM sequence: CTA
gttcaaccattgtggaagtc

SEQ ID NO: 415084 - DNA, 20 bp, Artificial Sequence
  Description of Artificial Sequence: Synthetic oligonucleotide
  Target: LAMA2; (+) strand; PAM type: YTN; PAM sequence: TTC
aaccattgtggaagtcagtg

SEQ ID NO: 415085 - DNA, 20 bp, Artificial Sequence
  Description of Artificial Sequence: Synthetic oligonucleotide
  Target: LAMA2; (+) strand; PAM type: YTN; PAM sequence: TTG
tggaagtcagtgtggccatt

SEQ ID NO: 415086 - DNA, 20 bp, Artificial Sequence
  Description of Artificial Sequence: Synthetic oligonucleotide
  Target: LAMA2; (+) strand; PAM type: YTN; PAM sequence: TTC
ctcagggatctagaactaga

SEQ ID NO: 415087 - DNA, 20 bp, Artificial Sequence
  Description of Artificial Sequence: Synthetic oligonucleotide
  Target: LAMA2; (+) strand; PAM type: YTN; PAM sequence: CTC
agggatctagaactagaaat

SEQ ID NO: 415088 - DNA, 20 bp, Artificial Sequence
  Description of Artificial Sequence: Synthetic oligonucleotide
  Target: LAMA2; (+) strand; PAM type: YTN; PAM sequence: CTA
gaactagaaataccatttga

SEQ ID NO: 415089 - DNA, 20 bp, Artificial Sequence
  Description of Artificial Sequence: Synthetic oligonucleotide
  Target: LAMA2; (+) strand; PAM type: YTN; PAM sequence: CTA
gaaataccatttgacccagc

SEQ ID NO: 415090 - DNA, 20 bp, Artificial Sequence
  Description of Artificial Sequence: Synthetic oligonucleotide
  Target: LAMA2; (+) strand; PAM type: YTN; PAM sequence: TTT
gacccagccatcccattact

SEQ ID NO: 415091 - DNA, 20 bp, Artificial Sequence
  Description of Artificial Sequence: Synthetic oligonucleotide
  Target: LAMA2; (+) strand; PAM type: YTN; PAM sequence: TTG
acccagccatcccattactg

SEQ ID NO: 415092 - DNA, 20 bp, Artificial Sequence
  Description of Artificial Sequence: Synthetic oligonucleotide
  Target: LAMA2; (+) strand; PAM type: YTN; PAM sequence: TTA
ctgggtatatacccaaagga

SEQ ID NO: 415093 - DNA, 20 bp, Artificial Sequence
  Description of Artificial Sequence: Synthetic oligonucleotide
  Target: LAMA2; (+) strand; PAM type: YTN; PAM sequence: CTG
ggtatatacccaaaggacta

SEQ ID NO: 415094 - DNA, 20 bp, Artificial Sequence
  Description of Artificial Sequence: Synthetic oligonucleotide
  Target: LAMA2; (+) strand; PAM type: YTN; PAM sequence: CTA
taaatcatgctgctataaag

SEQ ID NO: 415095 - DNA, 20 bp, Artificial Sequence
  Description of Artificial Sequence: Synthetic oligonucleotide
  Target: LAMA2; (+) strand; PAM type: YTN; PAM sequence: CTG
ctataaagacacatgcacat

SEQ ID NO: 415096 - DNA, 20 bp, Artificial Sequence
  Description of Artificial Sequence: Synthetic oligonucleotide
  Target: LAMA2; (+) strand; PAM type: YTN; PAM sequence: CTA
taaagacacatgcacatgta

SEQ ID NO: 415097 - DNA, 20 bp, Artificial Sequence
  Description of Artificial Sequence: Synthetic oligonucleotide
  Target: LAMA2; (+) strand; PAM type: YTN; PAM sequence: TTT
attgcggcactattcacaat

SEQ ID NO: 415098 - DNA, 20 bp, Artificial Sequence
  Description of Artificial Sequence: Synthetic oligonucleotide
  Target: LAMA2; (+) strand; PAM type: YTN; PAM sequence: TTA
ttgcggcactattcacaata

SEQ ID NO: 415099 - DNA, 20 bp, Artificial Sequence
  Description of Artificial Sequence: Synthetic oligonucleotide
  Target: LAMA2; (+) strand; PAM type: YTN; PAM sequence: TTG
cggcactattcacaatagca

SEQ ID NO: 415100 - DNA, 20 bp, Artificial Sequence
  Description of Artificial Sequence: Synthetic oligonucleotide
  Target: LAMA2; (+) strand; PAM type: YTN; PAM sequence: CTA
ttcacaatagcaaagacttg

SEQ ID NO: 415101 - DNA, 20 bp, Artificial Sequence
  Description of Artificial Sequence: Synthetic oligonucleotide
  Target: LAMA2; (+) strand; PAM type: YTN; PAM sequence: TTC
acaatagcaaagacttggaa

SEQ ID NO: 415102 - DNA, 20 bp, Artificial Sequence
  Description of Artificial Sequence: Synthetic oligonucleotide
  Target: LAMA2; (+) strand; PAM type: YTN; PAM sequence: CTT
ggaaccaacccaaatgtcca

SEQ ID NO: 415103 - DNA, 20 bp, Artificial Sequence
  Description of Artificial Sequence: Synthetic oligonucleotide
  Target: LAMA2; (+) strand; PAM type: YTN; PAM sequence: TTG
gaaccaacccaaatgtccaa

SEQ ID NO: 415104 - DNA, 20 bp, Artificial Sequence
  Description of Artificial Sequence: Synthetic oligonucleotide
  Target: LAMA2; (+) strand; PAM type: YTN; PAM sequence: CTG
gattaagcaaatgtggcaca

SEQ ID NO: 415105 - DNA, 20 bp, Artificial Sequence
  Description of Artificial Sequence: Synthetic oligonucleotide
  Target: LAMA2; (+) strand; PAM type: YTN; PAM sequence: TTA
agcaaatgtggcacatatac

SEQ ID NO: 415106 - DNA, 20 bp, Artificial Sequence
  Description of Artificial Sequence: Synthetic oligonucleotide
  Target: LAMA2; (+) strand; PAM type: YTN; PAM sequence: TTC
atgtcctttgtagggacatg

SEQ ID NO: 415107 - DNA, 20 bp, Artificial Sequence
  Description of Artificial Sequence: Synthetic oligonucleotide
  Target: LAMA2; (+) strand; PAM type: YTN; PAM sequence: CTT
tgtagggacatggatgaaac

SEQ ID NO: 415108 - DNA, 20 bp, Artificial Sequence
  Description of Artificial Sequence: Synthetic oligonucleotide
  Target: LAMA2; (+) strand; PAM type: YTN; PAM sequence: TTT
gtagggacatggatgaaact

SEQ ID NO: 415109 - DNA, 20 bp, Artificial Sequence
  Description of Artificial Sequence: Synthetic oligonucleotide
  Target: LAMA2; (+) strand; PAM type: YTN; PAM sequence: TTG
tagggacatggatgaaactg

SEQ ID NO: 415110 - DNA, 20 bp, Artificial Sequence
  Description of Artificial Sequence: Synthetic oligonucleotide
  Target: LAMA2; (+) strand; PAM type: YTN; PAM sequence: CTG
gaaatcatcattctcagtaa

SEQ ID NO: 415111 - DNA, 20 bp, Artificial Sequence
  Description of Artificial Sequence: Synthetic oligonucleotide
  Target: LAMA2; (+) strand; PAM type: YTN; PAM sequence: TTC
tcagtaaactatcacaagga

SEQ ID NO: 415112 - DNA, 20 bp, Artificial Sequence
  Description of Artificial Sequence: Synthetic oligonucleotide
  Target: LAMA2; (+) strand; PAM type: YTN; PAM sequence: CTC
agtaaactatcacaaggaca

SEQ ID NO: 415113 - DNA, 20 bp, Artificial Sequence
  Description of Artificial Sequence: Synthetic oligonucleotide
  Target: LAMA2; (+) strand; PAM type: YTN; PAM sequence: CTA
tcacaaggacaaaaaaccaa

SEQ ID NO: 415114 - DNA, 20 bp, Artificial Sequence
  Description of Artificial Sequence: Synthetic oligonucleotide
  Target: LAMA2; (+) strand; PAM type: YTN; PAM sequence: TTC
tcactcatagatgggaattg

SEQ ID NO: 415115 - DNA, 20 bp, Artificial Sequence
  Description of Artificial Sequence: Synthetic oligonucleotide
  Target: LAMA2; (+) strand; PAM type: YTN; PAM sequence: CTC
actcatagatgggaattgaa

SEQ ID NO: 415116 - DNA, 20 bp, Artificial Sequence
  Description of Artificial Sequence: Synthetic oligonucleotide
  Target: LAMA2; (+) strand; PAM type: YTN; PAM sequence: CTC
atagatgggaattgaacaat

SEQ ID NO: 415117 - DNA, 20 bp, Artificial Sequence
  Description of Artificial Sequence: Synthetic oligonucleotide
  Target: LAMA2; (+) strand; PAM type: YTN; PAM sequence: TTG
aacaatgagaacacatggac

SEQ ID NO: 415118 - DNA, 20 bp, Artificial Sequence
  Description of Artificial Sequence: Synthetic oligonucleotide
  Target: LAMA2; (+) strand; PAM type: YTN; PAM sequence: CTC
tggggactgttttggggtgg

SEQ ID NO: 415119 - DNA, 20 bp, Artificial Sequence
  Description of Artificial Sequence: Synthetic oligonucleotide
  Target: LAMA2; (+) strand; PAM type: YTN; PAM sequence: CTG
gggactgttttggggtgggg

SEQ ID NO: 415120 - DNA, 20 bp, Artificial Sequence
  Description of Artificial Sequence: Synthetic oligonucleotide
  Target: LAMA2; (+) strand; PAM type: YTN; PAM sequence: CTG
ttttggggtggggggagggg

SEQ ID NO: 415121 - DNA, 20 bp, Artificial Sequence
  Description of Artificial Sequence: Synthetic oligonucleotide
  Target: LAMA2; (+) strand; PAM type: YTN; PAM sequence: TTT
tggggtggggggagggggga

SEQ ID NO: 415122 - DNA, 20 bp, Artificial Sequence
  Description of Artificial Sequence: Synthetic oligonucleotide
  Target: LAMA2; (+) strand; PAM type: YTN; PAM sequence: TTT
ggggtggggggaggggggag

SEQ ID NO: 415123 - DNA, 20 bp, Artificial Sequence
  Description of Artificial Sequence: Synthetic oligonucleotide
  Target: LAMA2; (+) strand; PAM type: YTN; PAM sequence: TTG
gggtggggggaggggggagg

SEQ ID NO: 415124 - DNA, 20 bp, Artificial Sequence
  Description of Artificial Sequence: Synthetic oligonucleotide
  Target: LAMA2; (+) strand; PAM type: YTN; PAM sequence: TTA
ggagatagatatacctaatg

SEQ ID NO: 415125 - DNA, 20 bp, Artificial Sequence
  Description of Artificial Sequence: Synthetic oligonucleotide
  Target: LAMA2; (+) strand; PAM type: YTN; PAM sequence: CTA
atgttaaatgatgagttaat

SEQ ID NO: 415126 - DNA, 20 bp, Artificial Sequence
  Description of Artificial Sequence: Synthetic oligonucleotide
  Target: LAMA2; (+) strand; PAM type: YTN; PAM sequence: TTA
aatgatgagttaatgggtgc

SEQ ID NO: 415127 - DNA, 20 bp, Artificial Sequence
  Description of Artificial Sequence: Synthetic oligonucleotide
  Target: LAMA2; (+) strand; PAM type: YTN; PAM sequence: TTA
atgggtgcagcacaccagca

SEQ ID NO: 415128 - DNA, 20 bp, Artificial Sequence
  Description of Artificial Sequence: Synthetic oligonucleotide
  Target: LAMA2; (+) strand; PAM type: YTN; PAM sequence: CTA
accggcacattgtgcacatg

SEQ ID NO: 415129 - DNA, 20 bp, Artificial Sequence
  Description of Artificial Sequence: Synthetic oligonucleotide
  Target: LAMA2; (+) strand; PAM type: YTN; PAM sequence: TTG
tgcacatgtacccttaaact

SEQ ID NO: 415130 - DNA, 20 bp, Artificial Sequence
  Description of Artificial Sequence: Synthetic oligonucleotide
  Target: LAMA2; (+) strand; PAM type: YTN; PAM sequence: CTT
aaacttaaagtataataata

SEQ ID NO: 415131 - DNA, 20 bp, Artificial Sequence
  Description of Artificial Sequence: Synthetic oligonucleotide
  Target: LAMA2; (+) strand; PAM type: YTN; PAM sequence: TTA
aacttaaagtataataataa

SEQ ID NO: 415132 - DNA, 20 bp, Artificial Sequence
  Description of Artificial Sequence: Synthetic oligonucleotide
  Target: LAMA2; (+) strand; PAM type: YTN; PAM sequence: CTT
aaagtataataataataaaa

SEQ ID NO: 415133 - DNA, 20 bp, Artificial Sequence
  Description of Artificial Sequence: Synthetic oligonucleotide
  Target: LAMA2; (+) strand; PAM type: YTN; PAM sequence: TTA
aagtataataataataaaaa

SEQ ID NO: 415134 - DNA, 20 bp, Artificial Sequence
  Description of Artificial Sequence: Synthetic oligonucleotide
  Target: LAMA2; (+) strand; PAM type: YTN; PAM sequence: CTA
ttctaaaaagaaacattatc

SEQ ID NO: 415135 - DNA, 20 bp, Artificial Sequence
  Description of Artificial Sequence: Synthetic oligonucleotide
  Target: LAMA2; (+) strand; PAM type: YTN; PAM sequence: TTC
taaaaagaaacattatcctc

SEQ ID NO: 415136 - DNA, 20 bp, Artificial Sequence
  Description of Artificial Sequence: Synthetic oligonucleotide
  Target: LAMA2; (+) strand; PAM type: YTN; PAM sequence: CTA
aaaagaaacattatcctcca

SEQ ID NO: 415137 - DNA, 20 bp, Artificial Sequence
  Description of Artificial Sequence: Synthetic oligonucleotide
  Target: LAMA2; (+) strand; PAM type: YTN; PAM sequence: TTA
tcctccatgccaacaaagag

SEQ ID NO: 415138 - DNA, 20 bp, Artificial Sequence
  Description of Artificial Sequence: Synthetic oligonucleotide
  Target: LAMA2; (+) strand; PAM type: YTN; PAM sequence: CTC
catgccaacaaagagtttta

SEQ ID NO: 415139 - DNA, 20 bp, Artificial Sequence
  Description of Artificial Sequence: Synthetic oligonucleotide
  Target: LAMA2; (+) strand; PAM type: YTN; PAM sequence: TTT
tatagtcatttgagaattct

SEQ ID NO: 415140 - DNA, 20 bp, Artificial Sequence
  Description of Artificial Sequence: Synthetic oligonucleotide
  Target: LAMA2; (+) strand; PAM type: YTN; PAM sequence: TTT
atagtcatttgagaattcta

SEQ ID NO: 415141 - DNA, 20 bp, Artificial Sequence
  Description of Artificial Sequence: Synthetic oligonucleotide
  Target: LAMA2; (+) strand; PAM type: YTN; PAM sequence: TTA
tagtcatttgagaattctac

SEQ ID NO: 415142 - DNA, 20 bp, Artificial Sequence
  Description of Artificial Sequence: Synthetic oligonucleotide
  Target: LAMA2; (+) strand; PAM type: YTN; PAM sequence: TTT
gagaattctactattagctt

SEQ ID NO: 415143 - DNA, 20 bp, Artificial Sequence
  Description of Artificial Sequence: Synthetic oligonucleotide
  Target: LAMA2; (+) strand; PAM type: YTN; PAM sequence: TTG
agaattctactattagcttt

SEQ ID NO: 415144 - DNA, 20 bp, Artificial Sequence
  Description of Artificial Sequence: Synthetic oligonucleotide
  Target: LAMA2; (+) strand; PAM type: YTN; PAM sequence: TTC
tactattagctttgtcttgg

SEQ ID NO: 415145 - DNA, 20 bp, Artificial Sequence
  Description of Artificial Sequence: Synthetic oligonucleotide
  Target: LAMA2; (+) strand; PAM type: YTN; PAM sequence: CTA
ctattagctttgtcttggca

SEQ ID NO: 415146 - DNA, 20 bp, Artificial Sequence
  Description of Artificial Sequence: Synthetic oligonucleotide
  Target: LAMA2; (+) strand; PAM type: YTN; PAM sequence: CTA
ttagctttgtcttggcaatt

SEQ ID NO: 415147 - DNA, 20 bp, Artificial Sequence
  Description of Artificial Sequence: Synthetic oligonucleotide
  Target: LAMA2; (+) strand; PAM type: YTN; PAM sequence: TTA
gctttgtcttggcaatttcc

SEQ ID NO: 415148 - DNA, 20 bp, Artificial Sequence
  Description of Artificial Sequence: Synthetic oligonucleotide
  Target: LAMA2; (+) strand; PAM type: YTN; PAM sequence: CTT
tgtcttggcaatttccacac

SEQ ID NO: 415149 - DNA, 20 bp, Artificial Sequence
  Description of Artificial Sequence: Synthetic oligonucleotide
  Target: LAMA2; (+) strand; PAM type: YTN; PAM sequence: TTT
gtcttggcaatttccacacc

SEQ ID NO: 415150 - DNA, 20 bp, Artificial Sequence
  Description of Artificial Sequence: Synthetic oligonucleotide
  Target: LAMA2; (+) strand; PAM type: YTN; PAM sequence: TTG
tcttggcaatttccacaccc

SEQ ID NO: 415151 - DNA, 20 bp, Artificial Sequence
  Description of Artificial Sequence: Synthetic oligonucleotide
  Target: LAMA2; (+) strand; PAM type: YTN; PAM sequence: CTT
ggcaatttccacacccatta

SEQ ID NO: 415152 - DNA, 20 bp, Artificial Sequence
  Description of Artificial Sequence: Synthetic oligonucleotide
  Target: LAMA2; (+) strand; PAM type: YTN; PAM sequence: TTG
gcaatttccacacccattaa

SEQ ID NO: 415153 - DNA, 20 bp, Artificial Sequence
  Description of Artificial Sequence: Synthetic oligonucleotide
  Target: LAMA2; (+) strand; PAM type: YTN; PAM sequence: TTT
ccacacccattaaaaataat

SEQ ID NO: 415154 - DNA, 20 bp, Artificial Sequence
  Description of Artificial Sequence: Synthetic oligonucleotide
  Target: LAMA2; (+) strand; PAM type: YTN; PAM sequence: TTC
cacacccattaaaaataata

SEQ ID NO: 415155 - DNA, 20 bp, Artificial Sequence
  Description of Artificial Sequence: Synthetic oligonucleotide
  Target: LAMA2; (+) strand; PAM type: YTN; PAM sequence: TTA
aaaataataatattataggc

SEQ ID NO: 415156 - DNA, 20 bp, Artificial Sequence
  Description of Artificial Sequence: Synthetic oligonucleotide
  Target: LAMA2; (+) strand; PAM type: YTN; PAM sequence: TTA
taggccaggtgcagtagttc

SEQ ID NO: 415157 - DNA, 20 bp, Artificial Sequence
  Description of Artificial Sequence: Synthetic oligonucleotide
  Target: LAMA2; (+) strand; PAM type: YTN; PAM sequence: TTC
acacctgtaatcccagcact

SEQ ID NO: 415158 - DNA, 20 bp, Artificial Sequence
  Description of Artificial Sequence: Synthetic oligonucleotide
  Target: LAMA2; (+) strand; PAM type: YTN; PAM sequence: CTG
taatcccagcactttggtcg

SEQ ID NO: 415159 - DNA, 20 bp, Artificial Sequence
  Description of Artificial Sequence: Synthetic oligonucleotide
  Target: LAMA2; (+) strand; PAM type: YTN; PAM sequence: CTT
tggtcgctcaggcaggagga

SEQ ID NO: 415160 - DNA, 20 bp, Artificial Sequence
  Description of Artificial Sequence: Synthetic oligonucleotide
  Target: LAMA2; (+) strand; PAM type: YTN; PAM sequence: TTT
ggtcgctcaggcaggaggat

SEQ ID NO: 415161 - DNA, 20 bp, Artificial Sequence
  Description of Artificial Sequence: Synthetic oligonucleotide
  Target: LAMA2; (+) strand; PAM type: YTN; PAM sequence: TTG
gtcgctcaggcaggaggatc

SEQ ID NO: 415162 - DNA, 20 bp, Artificial Sequence
  Description of Artificial Sequence: Synthetic oligonucleotide
  Target: LAMA2; (+) strand; PAM type: YTN; PAM sequence: CTC
aggcaggaggatcagtggaa

SEQ ID NO: 415163 - DNA, 20 bp, Artificial Sequence
  Description of Artificial Sequence: Synthetic oligonucleotide
  Target: LAMA2; (+) strand; PAM type: YTN; PAM sequence: TTT
gagaccagcctgggcaacat

SEQ ID NO: 415164 - DNA, 20 bp, Artificial Sequence
  Description of Artificial Sequence: Synthetic oligonucleotide
  Target: LAMA2; (+) strand; PAM type: YTN; PAM sequence: TTG
agaccagcctgggcaacata

SEQ ID NO: 415165 - DNA, 20 bp, Artificial Sequence
  Description of Artificial Sequence: Synthetic oligonucleotide
  Target: LAMA2; (+) strand; PAM type: YTN; PAM sequence: CTG
ggcaacatagggagaccctg

SEQ ID NO: 415166 - DNA, 20 bp, Artificial Sequence
  Description of Artificial Sequence: Synthetic oligonucleotide
  Target: LAMA2; (+) strand; PAM type: YTN; PAM sequence: CTG
tctctaccaaaaatttaaaa

SEQ ID NO: 415167 - DNA, 20 bp, Artificial Sequence
  Description of Artificial Sequence: Synthetic oligonucleotide
  Target: LAMA2; (+) strand; PAM type: YTN; PAM sequence: CTC
taccaaaaatttaaaaatta

SEQ ID NO: 415168 - DNA, 20 bp, Artificial Sequence
  Description of Artificial Sequence: Synthetic oligonucleotide
  Target: LAMA2; (+) strand; PAM type: YTN; PAM sequence: CTA
ccaaaaatttaaaaattagc

SEQ ID NO: 415169 - DNA, 20 bp, Artificial Sequence
  Description of Artificial Sequence: Synthetic oligonucleotide
  Target: LAMA2; (+) strand; PAM type: YTN; PAM sequence: TTT
aaaaattagccaggcatagt

SEQ ID NO: 415170 - DNA, 20 bp, Artificial Sequence
  Description of Artificial Sequence: Synthetic oligonucleotide
  Target: LAMA2; (+) strand; PAM type: YTN; PAM sequence: TTA
aaaattagccaggcatagtg

SEQ ID NO: 415171 - DNA, 20 bp, Artificial Sequence
  Description of Artificial Sequence: Synthetic oligonucleotide
  Target: LAMA2; (+) strand; PAM type: YTN; PAM sequence: TTA
gccaggcatagtggcatgca

SEQ ID NO: 415172 - DNA, 20 bp, Artificial Sequence
  Description of Artificial Sequence: Synthetic oligonucleotide
  Target: LAMA2; (+) strand; PAM type: YTN; PAM sequence: CTA
tagtcctagctactccagga

SEQ ID NO: 415173 - DNA, 20 bp, Artificial Sequence
  Description of Artificial Sequence: Synthetic oligonucleotide
  Target: LAMA2; (+) strand; PAM type: YTN; PAM sequence: CTA
gctactccaggaggttgatg

SEQ ID NO: 415174 - DNA, 20 bp, Artificial Sequence
  Description of Artificial Sequence: Synthetic oligonucleotide
  Target: LAMA2; (+) strand; PAM type: YTN; PAM sequence: CTA
ctccaggaggttgatgcagg

SEQ ID NO: 415175 - DNA, 20 bp, Artificial Sequence
  Description of Artificial Sequence: Synthetic oligonucleotide
  Target: LAMA2; (+) strand; PAM type: YTN; PAM sequence: CTC
caggaggttgatgcaggaag

SEQ ID NO: 415176 - DNA, 20 bp, Artificial Sequence
  Description of Artificial Sequence: Synthetic oligonucleotide
  Target: LAMA2; (+) strand; PAM type: YTN; PAM sequence: TTG
atgcaggaagattgcttgag

SEQ ID NO: 415177 - DNA, 20 bp, Artificial Sequence
  Description of Artificial Sequence: Synthetic oligonucleotide
  Target: LAMA2; (+) strand; PAM type: YTN; PAM sequence: TTG
cttgagcctgggaggtcaaa

SEQ ID NO: 415178 - DNA, 20 bp, Artificial Sequence
  Description of Artificial Sequence: Synthetic oligonucleotide
  Target: LAMA2; (+) strand; PAM type: YTN; PAM sequence: CTT
gagcctgggaggtcaaagct

SEQ ID NO: 415179 - DNA, 20 bp, Artificial Sequence
  Description of Artificial Sequence: Synthetic oligonucleotide
  Target: LAMA2; (+) strand; PAM type: YTN; PAM sequence: TTG
agcctgggaggtcaaagctc

SEQ ID NO: 415180 - DNA, 20 bp, Artificial Sequence
  Description of Artificial Sequence: Synthetic oligonucleotide
  Target: LAMA2; (+) strand; PAM type: YTN; PAM sequence: CTG
ggaggtcaaagctccagtga

SEQ ID NO: 415181 - DNA, 20 bp, Artificial Sequence
  Description of Artificial Sequence: Synthetic oligonucleotide
  Target: LAMA2; (+) strand; PAM type: YTN; PAM sequence: CTC
cagtgagctgatgattatac

SEQ ID NO: 415182 - DNA, 20 bp, Artificial Sequence
  Description of Artificial Sequence: Synthetic oligonucleotide
  Target: LAMA2; (+) strand; PAM type: YTN; PAM sequence: CTG
atgattataccactgcactc

SEQ ID NO: 415183 - DNA, 20 bp, Artificial Sequence
  Description of Artificial Sequence: Synthetic oligonucleotide
  Target: LAMA2; (+) strand; PAM type: YTN; PAM sequence: TTA
taccactgcactccagcctg

SEQ ID NO: 415184 - DNA, 20 bp, Artificial Sequence
  Description of Artificial Sequence: Synthetic oligonucleotide
  Target: LAMA2; (+) strand; PAM type: YTN; PAM sequence: CTG
cactccagcctgggcaacag

SEQ ID NO: 415185 - DNA, 20 bp, Artificial Sequence
  Description of Artificial Sequence: Synthetic oligonucleotide
  Target: LAMA2; (+) strand; PAM type: YTN; PAM sequence: CTC
cagcctgggcaacagagcaa

SEQ ID NO: 415186 - DNA, 20 bp, Artificial Sequence
  Description of Artificial Sequence: Synthetic oligonucleotide
  Target: LAMA2; (+) strand; PAM type: YTN; PAM sequence: CTG
ggcaacagagcaagaccctg

SEQ ID NO: 415187 - DNA, 20 bp, Artificial Sequence
  Description of Artificial Sequence: Synthetic oligonucleotide
  Target: LAMA2; (+) strand; PAM type: YTN; PAM sequence: CTG
tctcaaatgaaagaaatatc

SEQ ID NO: 415188 - DNA, 20 bp, Artificial Sequence
  Description of Artificial Sequence: Synthetic oligonucleotide
  Target: LAMA2; (+) strand; PAM type: YTN; PAM sequence: CTC
aaatgaaagaaatatctttt

SEQ ID NO: 415189 - DNA, 20 bp, Artificial Sequence
  Description of Artificial Sequence: Synthetic oligonucleotide
  Target: LAMA2; (+) strand; PAM type: YTN; PAM sequence: CTT
tttatatcaaatattgaatc

SEQ ID NO: 415190 - DNA, 20 bp, Artificial Sequence
  Description of Artificial Sequence: Synthetic oligonucleotide
  Target: LAMA2; (+) strand; PAM type: YTN; PAM sequence: TTT
ttatatcaaatattgaatct

SEQ ID NO: 415191 - DNA, 20 bp, Artificial Sequence
  Description of Artificial Sequence: Synthetic oligonucleotide
  Target: LAMA2; (+) strand; PAM type: YTN; PAM sequence: TTT
tatatcaaatattgaatcta

SEQ ID NO: 415192 - DNA, 20 bp, Artificial Sequence
  Description of Artificial Sequence: Synthetic oligonucleotide
  Target: LAMA2; (+) strand; PAM type: YTN; PAM sequence: TTT
atatcaaatattgaatctag

SEQ ID NO: 415193 - DNA, 20 bp, Artificial Sequence
  Description of Artificial Sequence: Synthetic oligonucleotide
  Target: LAMA2; (+) strand; PAM type: YTN; PAM sequence: TTA
tatcaaatattgaatctagt

SEQ ID NO: 415194 - DNA, 20 bp, Artificial Sequence
  Description of Artificial Sequence: Synthetic oligonucleotide
  Target: LAMA2; (+) strand; PAM type: YTN; PAM sequence: TTG
aatctagtgaatttaatata

SEQ ID NO: 415195 - DNA, 20 bp, Artificial Sequence
  Description of Artificial Sequence: Synthetic oligonucleotide
  Target: LAMA2; (+) strand; PAM type: YTN; PAM sequence: CTA
gtgaatttaatatataaaac

SEQ ID NO: 415196 - DNA, 20 bp, Artificial Sequence
  Description of Artificial Sequence: Synthetic oligonucleotide
  Target: LAMA2; (+) strand; PAM type: YTN; PAM sequence: TTT
aatatataaaacattgaatc

SEQ ID NO: 415197 - DNA, 20 bp, Artificial Sequence
  Description of Artificial Sequence: Synthetic oligonucleotide
  Target: LAMA2; (+) strand; PAM type: YTN; PAM sequence: TTA
atatataaaacattgaatct

SEQ ID NO: 415198 - DNA, 20 bp, Artificial Sequence
  Description of Artificial Sequence: Synthetic oligonucleotide
  Target: LAMA2; (+) strand; PAM type: YTN; PAM sequence: TTG
aatctagtgaatatctttta

SEQ ID NO: 415199 - DNA, 20 bp, Artificial Sequence
  Description of Artificial Sequence: Synthetic oligonucleotide
  Target: LAMA2; (+) strand; PAM type: YTN; PAM sequence: CTA
gtgaatatcttttaaccaaa

SEQ ID NO: 415200 - DNA, 20 bp, Artificial Sequence
  Description of Artificial Sequence: Synthetic oligonucleotide
  Target: LAMA2; (+) strand; PAM type: YTN; PAM sequence: CTT
ttaaccaaactttaagaaat

SEQ ID NO: 415201 - DNA, 20 bp, Artificial Sequence
  Description of Artificial Sequence: Synthetic oligonucleotide
  Target: LAMA2; (+) strand; PAM type: YTN; PAM sequence: TTT
taaccaaactttaagaaata

SEQ ID NO: 415202 - DNA, 20 bp, Artificial Sequence
  Description of Artificial Sequence: Synthetic oligonucleotide
  Target: LAMA2; (+) strand; PAM type: YTN; PAM sequence: TTT
aaccaaactttaagaaataa

SEQ ID NO: 415203 - DNA, 20 bp, Artificial Sequence
  Description of Artificial Sequence: Synthetic oligonucleotide
  Target: LAMA2; (+) strand; PAM type: YTN; PAM sequence: TTA
accaaactttaagaaataaa

SEQ ID NO: 415204 - DNA, 20 bp, Artificial Sequence
  Description of Artificial Sequence: Synthetic oligonucleotide
  Target: LAMA2; (+) strand; PAM type: YTN; PAM sequence: CTT
taagaaataaaactttttga

SEQ ID NO: 415205 - DNA, 20 bp, Artificial Sequence
  Description of Artificial Sequence: Synthetic oligonucleotide
  Target: LAMA2; (+) strand; PAM type: YTN; PAM sequence: TTT
aagaaataaaactttttgaa

SEQ ID NO: 415206 - DNA, 20 bp, Artificial Sequence
  Description of Artificial Sequence: Synthetic oligonucleotide
  Target: LAMA2; (+) strand; PAM type: YTN; PAM sequence: TTA
agaaataaaactttttgaaa

SEQ ID NO: 415207 - DNA, 20 bp, Artificial Sequence
  Description of Artificial Sequence: Synthetic oligonucleotide
  Target: LAMA2; (+) strand; PAM type: YTN; PAM sequence: CTT
tttgaaaaccaatgtgtttt

SEQ ID NO: 415208 - DNA, 20 bp, Artificial Sequence
  Description of Artificial Sequence: Synthetic oligonucleotide
  Target: LAMA2; (+) strand; PAM type: YTN; PAM sequence: TTT
ttgaaaaccaatgtgtttta

SEQ ID NO: 415209 - DNA, 20 bp, Artificial Sequence
  Description of Artificial Sequence: Synthetic oligonucleotide
  Target: LAMA2; (+) strand; PAM type: YTN; PAM sequence: TTT
tgaaaaccaatgtgttttaa

SEQ ID NO: 415210 - DNA, 20 bp, Artificial Sequence
  Description of Artificial Sequence: Synthetic oligonucleotide
  Target: LAMA2; (+) strand; PAM type: YTN; PAM sequence: TTT
gaaaaccaatgtgttttaaa

SEQ ID NO: 415211 - DNA, 20 bp, Artificial Sequence
  Description of Artificial Sequence: Synthetic oligonucleotide
  Target: LAMA2; (+) strand; PAM type: YTN; PAM sequence: TTG
aaaaccaatgtgttttaaaa

SEQ ID NO: 415212 - DNA, 20 bp, Artificial Sequence
  Description of Artificial Sequence: Synthetic oligonucleotide
  Target: LAMA2; (+) strand; PAM type: YTN; PAM sequence: TTT
taaaagtggaaacatacatc

SEQ ID NO: 415213 - DNA, 20 bp, Artificial Sequence
  Description of Artificial Sequence: Synthetic oligonucleotide
  Target: LAMA2; (+) strand; PAM type: YTN; PAM sequence: TTT
aaaagtggaaacatacatct

SEQ ID NO: 415214 - DNA, 20 bp, Artificial Sequence
  Description of Artificial Sequence: Synthetic oligonucleotide
  Target: LAMA2; (+) strand; PAM type: YTN; PAM sequence: TTA
aaagtggaaacatacatctg

SEQ ID NO: 415215 - DNA, 20 bp, Artificial Sequence
  Description of Artificial Sequence: Synthetic oligonucleotide
  Target: LAMA2; (+) strand; PAM type: YTN; PAM sequence: CTG
cactaaacgctgacatgact

SEQ ID NO: 415216 - DNA, 20 bp, Artificial Sequence
  Description of Artificial Sequence: Synthetic oligonucleotide
  Target: LAMA2; (+) strand; PAM type: YTN; PAM sequence: CTA
aacgctgacatgactttttg

SEQ ID NO: 415217 - DNA, 20 bp, Artificial Sequence
  Description of Artificial Sequence: Synthetic oligonucleotide
  Target: LAMA2; (+) strand; PAM type: YTN; PAM sequence: CTG
acatgactttttgggcttaa

SEQ ID NO: 415218 - DNA, 20 bp, Artificial Sequence
  Description of Artificial Sequence: Synthetic oligonucleotide
  Target: LAMA2; (+) strand; PAM type: YTN; PAM sequence: CTT
tttgggcttaatctggacac

SEQ ID NO: 415219 - DNA, 20 bp, Artificial Sequence
  Description of Artificial Sequence: Synthetic oligonucleotide
  Target: LAMA2; (+) strand; PAM type: YTN; PAM sequence: TTT
ttgggcttaatctggacact

SEQ ID NO: 415220 - DNA, 20 bp, Artificial Sequence
  Description of Artificial Sequence: Synthetic oligonucleotide
  Target: LAMA2; (+) strand; PAM type: YTN; PAM sequence: TTT
tgggcttaatctggacactg

SEQ ID NO: 415221 - DNA, 20 bp, Artificial Sequence
  Description of Artificial Sequence: Synthetic oligonucleotide
  Target: LAMA2; (+) strand; PAM type: YTN; PAM sequence: TTT
gggcttaatctggacactga

SEQ ID NO: 415222 - DNA, 20 bp, Artificial Sequence
  Description of Artificial Sequence: Synthetic oligonucleotide
  Target: LAMA2; (+) strand; PAM type: YTN; PAM sequence: TTG
ggcttaatctggacactgag

SEQ ID NO: 415223 - DNA, 20 bp, Artificial Sequence
  Description of Artificial Sequence: Synthetic oligonucleotide
  Target: LAMA2; (+) strand; PAM type: YTN; PAM sequence: CTT
aatctggacactgagtggga

SEQ ID NO: 415224 - DNA, 20 bp, Artificial Sequence
  Description of Artificial Sequence: Synthetic oligonucleotide
  Target: LAMA2; (+) strand; PAM type: YTN; PAM sequence: TTA
atctggacactgagtgggat

SEQ ID NO: 415225 - DNA, 20 bp, Artificial Sequence
  Description of Artificial Sequence: Synthetic oligonucleotide
  Target: LAMA2; (+) strand; PAM type: YTN; PAM sequence: CTG
gacactgagtgggataaaca

SEQ ID NO: 415226 - DNA, 20 bp, Artificial Sequence
  Description of Artificial Sequence: Synthetic oligonucleotide
  Target: LAMA2; (+) strand; PAM type: YTN; PAM sequence: CTG
agtgggataaacaggaataa

SEQ ID NO: 415227 - DNA, 20 bp, Artificial Sequence
  Description of Artificial Sequence: Synthetic oligonucleotide
  Target: LAMA2; (+) strand; PAM type: YTN; PAM sequence: TTG
ggttccttagattaaaagct

SEQ ID NO: 415228 - DNA, 20 bp, Artificial Sequence
  Description of Artificial Sequence: Synthetic oligonucleotide
  Target: LAMA2; (+) strand; PAM type: YTN; PAM sequence: TTC
cttagattaaaagctaaagc

SEQ ID NO: 415229 - DNA, 20 bp, Artificial Sequence
  Description of Artificial Sequence: Synthetic oligonucleotide
  Target: LAMA2; (+) strand; PAM type: YTN; PAM sequence: CTT
agattaaaagctaaagcctt

SEQ ID NO: 415230 - DNA, 20 bp, Artificial Sequence
  Description of Artificial Sequence: Synthetic oligonucleotide
  Target: LAMA2; (+) strand; PAM type: YTN; PAM sequence: TTA
gattaaaagctaaagccttt

SEQ ID NO: 415231 - DNA, 20 bp, Artificial Sequence
  Description of Artificial Sequence: Synthetic oligonucleotide
  Target: LAMA2; (+) strand; PAM type: YTN; PAM sequence: TTA
aaagctaaagcctttctttc

SEQ ID NO: 415232 - DNA, 20 bp, Artificial Sequence
  Description of Artificial Sequence: Synthetic oligonucleotide
  Target: LAMA2; (+) strand; PAM type: YTN; PAM sequence: CTA
aagcctttctttcttgagtc

SEQ ID NO: 415233 - DNA, 20 bp, Artificial Sequence
  Description of Artificial Sequence: Synthetic oligonucleotide
  Target: LAMA2; (+) strand; PAM type: YTN; PAM sequence: CTT
tctttcttgagtcctgcaca

SEQ ID NO: 415234 - DNA, 20 bp, Artificial Sequence
  Description of Artificial Sequence: Synthetic oligonucleotide
  Target: LAMA2; (+) strand; PAM type: YTN; PAM sequence: TTT
ctttcttgagtcctgcacag

SEQ ID NO: 415235 - DNA, 20 bp, Artificial Sequence
  Description of Artificial Sequence: Synthetic oligonucleotide
  Target: LAMA2; (+) strand; PAM type: YTN; PAM sequence: TTC
tttcttgagtcctgcacaga

SEQ ID NO: 415236 - DNA, 20 bp, Artificial Sequence
  Description of Artificial Sequence: Synthetic oligonucleotide
  Target: LAMA2; (+) strand; PAM type: YTN; PAM sequence: CTT
tcttgagtcctgcacagaaa

SEQ ID NO: 415237 - DNA, 20 bp, Artificial Sequence
  Description of Artificial Sequence: Synthetic oligonucleotide
  Target: LAMA2; (+) strand; PAM type: YTN; PAM sequence: TTT
cttgagtcctgcacagaaag

SEQ ID NO: 415238 - DNA, 20 bp, Artificial Sequence
  Description of Artificial Sequence: Synthetic oligonucleotide
  Target: LAMA2; (+) strand; PAM type: YTN; PAM sequence: TTC
ttgagtcctgcacagaaaga

SEQ ID NO: 415239 - DNA, 20 bp, Artificial Sequence
  Description of Artificial Sequence: Synthetic oligonucleotide
  Target: LAMA2; (+) strand; PAM type: YTN; PAM sequence: CTT
gagtcctgcacagaaagata

SEQ ID NO: 415240 - DNA, 20 bp, Artificial Sequence
  Description of Artificial Sequence: Synthetic oligonucleotide
  Target: LAMA2; (+) strand; PAM type: YTN; PAM sequence: TTG
agtcctgcacagaaagatat

SEQ ID NO: 415241 - DNA, 20 bp, Artificial Sequence
  Description of Artificial Sequence: Synthetic oligonucleotide
  Target: LAMA2; (+) strand; PAM type: YTN; PAM sequence: CTG
cacagaaagatatgtaacaa

SEQ ID NO: 415242 - DNA, 20 bp, Artificial Sequence
  Description of Artificial Sequence: Synthetic oligonucleotide
  Target: LAMA2; (+) strand; PAM type: YTN; PAM sequence: TTA
aattggcactcctatcagaa

SEQ ID NO: 415243 - DNA, 20 bp, Artificial Sequence
  Description of Artificial Sequence: Synthetic oligonucleotide
  Target: LAMA2; (+) strand; PAM type: YTN; PAM sequence: TTG
gcactcctatcagaataaag

SEQ ID NO: 415244 - DNA, 20 bp, Artificial Sequence
  Description of Artificial Sequence: Synthetic oligonucleotide
  Target: LAMA2; (+) strand; PAM type: YTN; PAM sequence: CTC
ctatcagaataaagtcctgc

SEQ ID NO: 415245 - DNA, 20 bp, Artificial Sequence
  Description of Artificial Sequence: Synthetic oligonucleotide
  Target: LAMA2; (+) strand; PAM type: YTN; PAM sequence: CTA
tcagaataaagtcctgcctc

SEQ ID NO: 415246 - DNA, 20 bp, Artificial Sequence
  Description of Artificial Sequence: Synthetic oligonucleotide
  Target: LAMA2; (+) strand; PAM type: YTN; PAM sequence: CTG
cctcagtcaatttgtaggta

SEQ ID NO: 415247 - DNA, 20 bp, Artificial Sequence
  Description of Artificial Sequence: Synthetic oligonucleotide
  Target: LAMA2; (+) strand; PAM type: YTN; PAM sequence: CTC
agtcaatttgtaggtagatg

SEQ ID NO: 415248 - DNA, 20 bp, Artificial Sequence
  Description of Artificial Sequence: Synthetic oligonucleotide
  Target: LAMA2; (+) strand; PAM type: YTN; PAM sequence: TTT
gtaggtagatgccttagaat

SEQ ID NO: 415249 - DNA, 20 bp, Artificial Sequence
  Description of Artificial Sequence: Synthetic oligonucleotide
  Target: LAMA2; (+) strand; PAM type: YTN; PAM sequence: TTG
taggtagatgccttagaatg

SEQ ID NO: 415250 - DNA, 20 bp, Artificial Sequence
  Description of Artificial Sequence: Synthetic oligonucleotide
  Target: LAMA2; (+) strand; PAM type: YTN; PAM sequence: CTT
agaatgatagaatgatagaa

SEQ ID NO: 415251 - DNA, 20 bp, Artificial Sequence
  Description of Artificial Sequence: Synthetic oligonucleotide
  Target: LAMA2; (+) strand; PAM type: YTN; PAM sequence: TTA
gaatgatagaatgatagaac

SEQ ID NO: 415252 - DNA, 20 bp, Artificial Sequence
  Description of Artificial Sequence: Synthetic oligonucleotide
  Target: LAMA2; (+) strand; PAM type: YTN; PAM sequence: CTG
gaagtgaattgagatcagcg

SEQ ID NO: 415253 - DNA, 20 bp, Artificial Sequence
  Description of Artificial Sequence: Synthetic oligonucleotide
  Target: LAMA2; (+) strand; PAM type: YTN; PAM sequence: TTG
agatcagcgaatacagtgat

SEQ ID NO: 415254 - DNA, 20 bp, Artificial Sequence
  Description of Artificial Sequence: Synthetic oligonucleotide
  Target: LAMA2; (+) strand; PAM type: YTN; PAM sequence: TTC
tcaagtctagctagatgttt

SEQ ID NO: 415255 - DNA, 20 bp, Artificial Sequence
  Description of Artificial Sequence: Synthetic oligonucleotide
  Target: LAMA2; (+) strand; PAM type: YTN; PAM sequence: CTC
aagtctagctagatgtttaa

SEQ ID NO: 415256 - DNA, 20 bp, Artificial Sequence
  Description of Artificial Sequence: Synthetic oligonucleotide
  Target: LAMA2; (+) strand; PAM type: YTN; PAM sequence: CTA
gctagatgtttaaagtgctt

SEQ ID NO: 415257 - DNA, 20 bp, Artificial Sequence
  Description of Artificial Sequence: Synthetic oligonucleotide
  Target: LAMA2; (+) strand; PAM type: YTN; PAM sequence: CTA
gatgtttaaagtgctttggg

SEQ ID NO: 415258 - DNA, 20 bp, Artificial Sequence
  Description of Artificial Sequence: Synthetic oligonucleotide
  Target: LAMA2; (+) strand; PAM type: YTN; PAM sequence: TTT
aaagtgctttgggtgcttaa

SEQ ID NO: 415259 - DNA, 20 bp, Artificial Sequence
  Description of Artificial Sequence: Synthetic oligonucleotide
  Target: LAMA2; (+) strand; PAM type: YTN; PAM sequence: TTA
aagtgctttgggtgcttaaa

SEQ ID NO: 415260 - DNA, 20 bp, Artificial Sequence
  Description of Artificial Sequence: Synthetic oligonucleotide
  Target: LAMA2; (+) strand; PAM type: YTN; PAM sequence: CTT
tgggtgcttaaaaaatctac

SEQ ID NO: 415261 - DNA, 20 bp, Artificial Sequence
  Description of Artificial Sequence: Synthetic oligonucleotide
  Target: LAMA2; (+) strand; PAM type: YTN; PAM sequence: TTT
gggtgcttaaaaaatctaca

SEQ ID NO: 415262 - DNA, 20 bp, Artificial Sequence
  Description of Artificial Sequence: Synthetic oligonucleotide
  Target: LAMA2; (+) strand; PAM type: YTN; PAM sequence: TTG
ggtgcttaaaaaatctacat

SEQ ID NO: 415263 - DNA, 20 bp, Artificial Sequence
  Description of Artificial Sequence: Synthetic oligonucleotide
  Target: LAMA2; (+) strand; PAM type: YTN; PAM sequence: CTT
aaaaaatctacatttgggct

SEQ ID NO: 415264 - DNA, 20 bp, Artificial Sequence
  Description of Artificial Sequence: Synthetic oligonucleotide
  Target: LAMA2; (+) strand; PAM type: YTN; PAM sequence: TTA
aaaaatctacatttgggctg

SEQ ID NO: 415265 - DNA, 20 bp, Artificial Sequence
  Description of Artificial Sequence: Synthetic oligonucleotide
  Target: LAMA2; (+) strand; PAM type: YTN; PAM sequence: CTA
catttgggctgggcacagca

SEQ ID NO: 415266 - DNA, 20 bp, Artificial Sequence
  Description of Artificial Sequence: Synthetic oligonucleotide
  Target: LAMA2; (+) strand; PAM type: YTN; PAM sequence: TTT
gggctgggcacagcagctca

SEQ ID NO: 415267 - DNA, 20 bp, Artificial Sequence
  Description of Artificial Sequence: Synthetic oligonucleotide
  Target: LAMA2; (+) strand; PAM type: YTN; PAM sequence: TTG
ggctgggcacagcagctcac

SEQ ID NO: 415268 - DNA, 20 bp, Artificial Sequence
  Description of Artificial Sequence: Synthetic oligonucleotide
  Target: LAMA2; (+) strand; PAM type: YTN; PAM sequence: CTG
ggcacagcagctcacgcctg

SEQ ID NO: 415269 - DNA, 20 bp, Artificial Sequence
  Description of Artificial Sequence: Synthetic oligonucleotide
  Target: LAMA2; (+) strand; PAM type: YTN; PAM sequence: CTC
acgcctgtaatcccaacact

SEQ ID NO: 415270 - DNA, 20 bp, Artificial Sequence
  Description of Artificial Sequence: Synthetic oligonucleotide
  Target: LAMA2; (+) strand; PAM type: YTN; PAM sequence: CTG
taatcccaacactctgggag

SEQ ID NO: 415271 - DNA, 20 bp, Artificial Sequence
  Description of Artificial Sequence: Synthetic oligonucleotide
  Target: LAMA2; (+) strand; PAM type: YTN; PAM sequence: CTC
tgggaggccaaggcaggagg

SEQ ID NO: 415272 - DNA, 20 bp, Artificial Sequence
  Description of Artificial Sequence: Synthetic oligonucleotide
  Target: LAMA2; (+) strand; PAM type: YTN; PAM sequence: CTG
ggaggccaaggcaggaggat

SEQ ID NO: 415273 - DNA, 20 bp, Artificial Sequence
  Description of Artificial Sequence: Synthetic oligonucleotide
  Target: LAMA2; (+) strand; PAM type: YTN; PAM sequence: CTT
aagcccaggagtttgagacc

SEQ ID NO: 415274 - DNA, 20 bp, Artificial Sequence
  Description of Artificial Sequence: Synthetic oligonucleotide
  Target: LAMA2; (+) strand; PAM type: YTN; PAM sequence: TTA
agcccaggagtttgagacca

SEQ ID NO: 415275 - DNA, 20 bp, Artificial Sequence
  Description of Artificial Sequence: Synthetic oligonucleotide
  Target: LAMA2; (+) strand; PAM type: YTN; PAM sequence: TTT
gagaccagcctgagccacac

SEQ ID NO: 415276 - DNA, 20 bp, Artificial Sequence
  Description of Artificial Sequence: Synthetic oligonucleotide
  Target: LAMA2; (+) strand; PAM type: YTN; PAM sequence: TTG
agaccagcctgagccacaca

SEQ ID NO: 415277 - DNA, 20 bp, Artificial Sequence
  Description of Artificial Sequence: Synthetic oligonucleotide
  Target: LAMA2; (+) strand; PAM type: YTN; PAM sequence: CTG
agccacacagtgagacctta

SEQ ID NO: 415278 - DNA, 20 bp, Artificial Sequence
  Description of Artificial Sequence: Synthetic oligonucleotide
  Target: LAMA2; (+) strand; PAM type: YTN; PAM sequence: CTT
agctctaaaaaaaaaaaaaa

SEQ ID NO: 415279 - DNA, 20 bp, Artificial Sequence
  Description of Artificial Sequence: Synthetic oligonucleotide
  Target: LAMA2; (+) strand; PAM type: YTN; PAM sequence: TTA
gctctaaaaaaaaaaaaaaa

SEQ ID NO: 415280 - DNA, 20 bp, Artificial Sequence
  Description of Artificial Sequence: Synthetic oligonucleotide
  Target: LAMA2; (+) strand; PAM type: YTN; PAM sequence: CTC
taaaaaaaaaaaaaaaaaaa

SEQ ID NO: 415281 - DNA, 20 bp, Artificial Sequence
  Description of Artificial Sequence: Synthetic oligonucleotide
  Target: LAMA2; (+) strand; PAM type: YTN; PAM sequence: CTA
aaaaaaaaaaaaaaaaaaaa

SEQ ID NO: 415282 - DNA, 20 bp, Artificial Sequence
  Description of Artificial Sequence: Synthetic oligonucleotide
  Target: LAMA2; (+) strand; PAM type: YTN; PAM sequence: TTA
gcctggtgtgttggtggtgc

SEQ ID NO: 415283 - DNA, 20 bp, Artificial Sequence
  Description of Artificial Sequence: Synthetic oligonucleotide
  Target: LAMA2; (+) strand; PAM type: YTN; PAM sequence: CTG
gtgtgttggtggtgcatgcc

SEQ ID NO: 415284 - DNA, 20 bp, Artificial Sequence
  Description of Artificial Sequence: Synthetic oligonucleotide
  Target: LAMA2; (+) strand; PAM type: YTN; PAM sequence: TTG
gtggtgcatgcctgtgtggt

SEQ ID NO: 415285 - DNA, 20 bp, Artificial Sequence
  Description of Artificial Sequence: Synthetic oligonucleotide
  Target: LAMA2; (+) strand; PAM type: YTN; PAM sequence: CTG
tgtggtcccgactatttggg

SEQ ID NO: 415286 - DNA, 20 bp, Artificial Sequence
  Description of Artificial Sequence: Synthetic oligonucleotide
  Target: LAMA2; (+) strand; PAM type: YTN; PAM sequence: CTA
tttgggaagctgaggtggga

SEQ ID NO: 415287 - DNA, 20 bp, Artificial Sequence
  Description of Artificial Sequence: Synthetic oligonucleotide
  Target: LAMA2; (+) strand; PAM type: YTN; PAM sequence: TTT
gggaagctgaggtgggaggt

SEQ ID NO: 415288 - DNA, 20 bp, Artificial Sequence
  Description of Artificial Sequence: Synthetic oligonucleotide
  Target: LAMA2; (+) strand; PAM type: YTN; PAM sequence: TTG
ggaagctgaggtgggaggtt

SEQ ID NO: 415289 - DNA, 20 bp, Artificial Sequence
  Description of Artificial Sequence: Synthetic oligonucleotide
  Target: LAMA2; (+) strand; PAM type: YTN; PAM sequence: CTG
aggtgggaggttcacttgag

SEQ ID NO: 415290 - DNA, 20 bp, Artificial Sequence
  Description of Artificial Sequence: Synthetic oligonucleotide
  Target: LAMA2; (+) strand; PAM type: YTN; PAM sequence: TTC
acttgagcagggtaggttaa

SEQ ID NO: 415291 - DNA, 20 bp, Artificial Sequence
  Description of Artificial Sequence: Synthetic oligonucleotide
  Target: LAMA2; (+) strand; PAM type: YTN; PAM sequence: CTT
gagcagggtaggttaaggct

SEQ ID NO: 415292 - DNA, 20 bp, Artificial Sequence
  Description of Artificial Sequence: Synthetic oligonucleotide
  Target: LAMA2; (+) strand; PAM type: YTN; PAM sequence: TTG
agcagggtaggttaaggctg

SEQ ID NO: 415293 - DNA, 20 bp, Artificial Sequence
  Description of Artificial Sequence: Synthetic oligonucleotide
  Target: LAMA2; (+) strand; PAM type: YTN; PAM sequence: TTA
aggctgcagtgagccagtga

SEQ ID NO: 415294 - DNA, 20 bp, Artificial Sequence
  Description of Artificial Sequence: Synthetic oligonucleotide
  Target: LAMA2; (+) strand; PAM type: YTN; PAM sequence: CTG
cagtgagccagtgatcgtga

SEQ ID NO: 415295 - DNA, 20 bp, Artificial Sequence
  Description of Artificial Sequence: Synthetic oligonucleotide
  Target: LAMA2; (+) strand; PAM type: YTN; PAM sequence: CTA
tgctacagcctgggcaacaa

SEQ ID NO: 415296 - DNA, 20 bp, Artificial Sequence
  Description of Artificial Sequence: Synthetic oligonucleotide
  Target: LAMA2; (+) strand; PAM type: YTN; PAM sequence: CTA
cagcctgggcaacaaagcaa

SEQ ID NO: 415297 - DNA, 20 bp, Artificial Sequence
  Description of Artificial Sequence: Synthetic oligonucleotide
  Target: LAMA2; (+) strand; PAM type: YTN; PAM sequence: CTG
ggcaacaaagcaatatcctg

SEQ ID NO: 415298 - DNA, 20 bp, Artificial Sequence
  Description of Artificial Sequence: Synthetic oligonucleotide
  Target: LAMA2; (+) strand; PAM type: YTN; PAM sequence: CTG
tctcaaaaaagaaaaaaaaa

SEQ ID NO: 415299 - DNA, 20 bp, Artificial Sequence
  Description of Artificial Sequence: Synthetic oligonucleotide
  Target: LAMA2; (+) strand; PAM type: YTN; PAM sequence: CTC
aaaaaagaaaaaaaaaattg

SEQ ID NO: 415300 - DNA, 20 bp, Artificial Sequence
  Description of Artificial Sequence: Synthetic oligonucleotide
  Target: LAMA2; (+) strand; PAM type: YTN; PAM sequence: TTG
acatctgggtgtcaccccag

SEQ ID NO: 415301 - DNA, 20 bp, Artificial Sequence
  Description of Artificial Sequence: Synthetic oligonucleotide
  Target: LAMA2; (+) strand; PAM type: YTN; PAM sequence: CTG
ggtgtcaccccagcccaatt

SEQ ID NO: 415302 - DNA, 20 bp, Artificial Sequence
  Description of Artificial Sequence: Synthetic oligonucleotide
  Target: LAMA2; (+) strand; PAM type: YTN; PAM sequence: TTA
aactataatctctgggtagg

SEQ ID NO: 415303 - DNA, 20 bp, Artificial Sequence
  Description of Artificial Sequence: Synthetic oligonucleotide
  Target: LAMA2; (+) strand; PAM type: YTN; PAM sequence: CTA
taatctctgggtagggccca

SEQ ID NO: 415304 - DNA, 20 bp, Artificial Sequence
  Description of Artificial Sequence: Synthetic oligonucleotide
  Target: LAMA2; (+) strand; PAM type: YTN; PAM sequence: CTC
tgggtagggcccaggcattg

SEQ ID NO: 415305 - DNA, 20 bp, Artificial Sequence
  Description of Artificial Sequence: Synthetic oligonucleotide
  Target: LAMA2; (+) strand; PAM type: YTN; PAM sequence: CTG
ggtagggcccaggcattggc

SEQ ID NO: 415306 - DNA, 20 bp, Artificial Sequence
  Description of Artificial Sequence: Synthetic oligonucleotide
  Target: LAMA2; (+) strand; PAM type: YTN; PAM sequence: TTG
gcattttttaaaaatcccca

SEQ ID NO: 415307 - DNA, 20 bp, Artificial Sequence
  Description of Artificial Sequence: Synthetic oligonucleotide
  Target: LAMA2; (+) strand; PAM type: YTN; PAM sequence: TTT
tttaaaaatccccacttgat

SEQ ID NO: 415308 - DNA, 20 bp, Artificial Sequence
  Description of Artificial Sequence: Synthetic oligonucleotide
  Target: LAMA2; (+) strand; PAM type: YTN; PAM sequence: TTT
ttaaaaatccccacttgatt

SEQ ID NO: 415309 - DNA, 20 bp, Artificial Sequence
  Description of Artificial Sequence: Synthetic oligonucleotide
  Target: LAMA2; (+) strand; PAM type: YTN; PAM sequence: TTT
taaaaatccccacttgattc

SEQ ID NO: 415310 - DNA, 20 bp, Artificial Sequence
  Description of Artificial Sequence: Synthetic oligonucleotide
  Target: LAMA2; (+) strand; PAM type: YTN; PAM sequence: TTT
aaaaatccccacttgattca

SEQ ID NO: 415311 - DNA, 20 bp, Artificial Sequence
  Description of Artificial Sequence: Synthetic oligonucleotide
  Target: LAMA2; (+) strand; PAM type: YTN; PAM sequence: TTA
aaaatccccacttgattcaa

SEQ ID NO: 415312 - DNA, 20 bp, Artificial Sequence
  Description of Artificial Sequence: Synthetic oligonucleotide
  Target: LAMA2; (+) strand; PAM type: YTN; PAM sequence: CTT
gattcaaatgtgaaaccaag

SEQ ID NO: 415313 - DNA, 20 bp, Artificial Sequence
  Description of Artificial Sequence: Synthetic oligonucleotide
  Target: LAMA2; (+) strand; PAM type: YTN; PAM sequence: TTG
attcaaatgtgaaaccaaga

SEQ ID NO: 415314 - DNA, 20 bp, Artificial Sequence
  Description of Artificial Sequence: Synthetic oligonucleotide
  Target: LAMA2; (+) strand; PAM type: YTN; PAM sequence: TTC
aaatgtgaaaccaagactga

SEQ ID NO: 415315 - DNA, 20 bp, Artificial Sequence
  Description of Artificial Sequence: Synthetic oligonucleotide
  Target: LAMA2; (+) strand; PAM type: YTN; PAM sequence: CTG
aaaacccctgggctcctgtc

SEQ ID NO: 415316 - DNA, 20 bp, Artificial Sequence
  Description of Artificial Sequence: Synthetic oligonucleotide
  Target: LAMA2; (+) strand; PAM type: YTN; PAM sequence: CTG
ggctcctgtcacctccacat

SEQ ID NO: 415317 - DNA, 20 bp, Artificial Sequence
  Description of Artificial Sequence: Synthetic oligonucleotide
  Target: LAMA2; (+) strand; PAM type: YTN; PAM sequence: CTC
ctgtcacctccacattttat

SEQ ID NO: 415318 - DNA, 20 bp, Artificial Sequence
  Description of Artificial Sequence: Synthetic oligonucleotide
  Target: LAMA2; (+) strand; PAM type: YTN; PAM sequence: CTG
tcacctccacattttatggg

SEQ ID NO: 415319 - DNA, 20 bp, Artificial Sequence
  Description of Artificial Sequence: Synthetic oligonucleotide
  Target: LAMA2; (+) strand; PAM type: YTN; PAM sequence: CTC
cacattttatggggaggaac

SEQ ID NO: 415320 - DNA, 20 bp, Artificial Sequence
  Description of Artificial Sequence: Synthetic oligonucleotide
  Target: LAMA2; (+) strand; PAM type: YTN; PAM sequence: TTT
tatggggaggaactagaagg

SEQ ID NO: 415321 - DNA, 20 bp, Artificial Sequence
  Description of Artificial Sequence: Synthetic oligonucleotide
  Target: LAMA2; (+) strand; PAM type: YTN; PAM sequence: TTT
atggggaggaactagaagga

SEQ ID NO: 415322 - DNA, 20 bp, Artificial Sequence
  Description of Artificial Sequence: Synthetic oligonucleotide
  Target: LAMA2; (+) strand; PAM type: YTN; PAM sequence: TTA
tggggaggaactagaaggaa

SEQ ID NO: 415323 - DNA, 20 bp, Artificial Sequence
  Description of Artificial Sequence: Synthetic oligonucleotide
  Target: LAMA2; (+) strand; PAM type: YTN; PAM sequence: CTA
gaaggaactcaaggatattt

SEQ ID NO: 415324 - DNA, 20 bp, Artificial Sequence
  Description of Artificial Sequence: Synthetic oligonucleotide
  Target: LAMA2; (+) strand; PAM type: YTN; PAM sequence: CTC
aaggatattttgataactgt

SEQ ID NO: 415325 - DNA, 20 bp, Artificial Sequence
  Description of Artificial Sequence: Synthetic oligonucleotide
  Target: LAMA2; (+) strand; PAM type: YTN; PAM sequence: TTT
tgataactgtgctcaaagtc

SEQ ID NO: 415326 - DNA, 20 bp, Artificial Sequence
  Description of Artificial Sequence: Synthetic oligonucleotide
  Target: LAMA2; (+) strand; PAM type: YTN; PAM sequence: TTT
gataactgtgctcaaagtcc

SEQ ID NO: 415327 - DNA, 20 bp, Artificial Sequence
  Description of Artificial Sequence: Synthetic oligonucleotide
  Target: LAMA2; (+) strand; PAM type: YTN; PAM sequence: TTG
ataactgtgctcaaagtccc

SEQ ID NO: 415328 - DNA, 20 bp, Artificial Sequence
  Description of Artificial Sequence: Synthetic oligonucleotide
  Target: LAMA2; (+) strand; PAM type: YTN; PAM sequence: CTG
tgctcaaagtcccaccttag

SEQ ID NO: 415329 - DNA, 20 bp, Artificial Sequence
  Description of Artificial Sequence: Synthetic oligonucleotide
  Target: LAMA2; (+) strand; PAM type: YTN; PAM sequence: CTC
aaagtcccaccttagtaaag

SEQ ID NO: 415330 - DNA, 20 bp, Artificial Sequence
  Description of Artificial Sequence: Synthetic oligonucleotide
  Target: LAMA2; (+) strand; PAM type: YTN; PAM sequence: CTT
agtaaagtttcccaatgtag

SEQ ID NO: 415331 - DNA, 20 bp, Artificial Sequence
  Description of Artificial Sequence: Synthetic oligonucleotide
  Target: LAMA2; (+) strand; PAM type: YTN; PAM sequence: TTA
gtaaagtttcccaatgtagt

SEQ ID NO: 415332 - DNA, 20 bp, Artificial Sequence
  Description of Artificial Sequence: Synthetic oligonucleotide
  Target: LAMA2; (+) strand; PAM type: YTN; PAM sequence: TTT
cccaatgtagtccagacagt

SEQ ID NO: 415333 - DNA, 20 bp, Artificial Sequence
  Description of Artificial Sequence: Synthetic oligonucleotide
  Target: LAMA2; (+) strand; PAM type: YTN; PAM sequence: TTC
ccaatgtagtccagacagtt

SEQ ID NO: 415334 - DNA, 20 bp, Artificial Sequence
  Description of Artificial Sequence: Synthetic oligonucleotide
  Target: LAMA2; (+) strand; PAM type: YTN; PAM sequence: TTG
catctggatccaagcagaat

SEQ ID NO: 415335 - DNA, 20 bp, Artificial Sequence
  Description of Artificial Sequence: Synthetic oligonucleotide
  Target: LAMA2; (+) strand; PAM type: YTN; PAM sequence: CTG
gatccaagcagaattcactg

SEQ ID NO: 415336 - DNA, 20 bp, Artificial Sequence
  Description of Artificial Sequence: Synthetic oligonucleotide
  Target: LAMA2; (+) strand; PAM type: YTN; PAM sequence: TTC
actgaattaggtttggacaa

SEQ ID NO: 415337 - DNA, 20 bp, Artificial Sequence
  Description of Artificial Sequence: Synthetic oligonucleotide
  Target: LAMA2; (+) strand; PAM type: YTN; PAM sequence: CTG
aattaggtttggacaaaact

SEQ ID NO: 415338 - DNA, 20 bp, Artificial Sequence
  Description of Artificial Sequence: Synthetic oligonucleotide
  Target: LAMA2; (+) strand; PAM type: YTN; PAM sequence: TTA
ggtttggacaaaacttgtcc

SEQ ID NO: 415339 - DNA, 20 bp, Artificial Sequence
  Description of Artificial Sequence: Synthetic oligonucleotide
  Target: LAMA2; (+) strand; PAM type: YTN; PAM sequence: TTT
ggacaaaacttgtcccatgc

SEQ ID NO: 415340 - DNA, 20 bp, Artificial Sequence
  Description of Artificial Sequence: Synthetic oligonucleotide
  Target: LAMA2; (+) strand; PAM type: YTN; PAM sequence: TTG
gacaaaacttgtcccatgca

SEQ ID NO: 415341 - DNA, 20 bp, Artificial Sequence
  Description of Artificial Sequence: Synthetic oligonucleotide
  Target: LAMA2; (+) strand; PAM type: YTN; PAM sequence: CTT
gtcccatgcaaaattcatac

SEQ ID NO: 415342 - DNA, 20 bp, Artificial Sequence
  Description of Artificial Sequence: Synthetic oligonucleotide
  Target: LAMA2; (+) strand; PAM type: YTN; PAM sequence: TTG
tcccatgcaaaattcatact

SEQ ID NO: 415343 - DNA, 20 bp, Artificial Sequence
  Description of Artificial Sequence: Synthetic oligonucleotide
  Target: LAMA2; (+) strand; PAM type: YTN; PAM sequence: TTC
atactccagagtgacccatg

SEQ ID NO: 415344 - DNA, 20 bp, Artificial Sequence
  Description of Artificial Sequence: Synthetic oligonucleotide
  Target: LAMA2; (+) strand; PAM type: YTN; PAM sequence: CTC
cagagtgacccatgaatttg

SEQ ID NO: 415345 - DNA, 20 bp, Artificial Sequence
  Description of Artificial Sequence: Synthetic oligonucleotide
  Target: LAMA2; (+) strand; PAM type: YTN; PAM sequence: TTT
ggataaccaaaaattgtcca

SEQ ID NO: 415346 - DNA, 20 bp, Artificial Sequence
  Description of Artificial Sequence: Synthetic oligonucleotide
  Target: LAMA2; (+) strand; PAM type: YTN; PAM sequence: TTG
gataaccaaaaattgtccac

SEQ ID NO: 415347 - DNA, 20 bp, Artificial Sequence
  Description of Artificial Sequence: Synthetic oligonucleotide
  Target: LAMA2; (+) strand; PAM type: YTN; PAM sequence: TTG
tccacattttaaggtcagaa

SEQ ID NO: 415348 - DNA, 20 bp, Artificial Sequence
  Description of Artificial Sequence: Synthetic oligonucleotide
  Target: LAMA2; (+) strand; PAM type: YTN; PAM sequence: TTT
taaggtcagaaataaggaca

SEQ ID NO: 415349 - DNA, 20 bp, Artificial Sequence
  Description of Artificial Sequence: Synthetic oligonucleotide
  Target: LAMA2; (+) strand; PAM type: YTN; PAM sequence: TTT
aaggtcagaaataaggacat

SEQ ID NO: 415350 - DNA, 20 bp, Artificial Sequence
  Description of Artificial Sequence: Synthetic oligonucleotide
  Target: LAMA2; (+) strand; PAM type: YTN; PAM sequence: TTA
aggtcagaaataaggacatt

SEQ ID NO: 415351 - DNA, 20 bp, Artificial Sequence
  Description of Artificial Sequence: Synthetic oligonucleotide
  Target: LAMA2; (+) strand; PAM type: YTN; PAM sequence: TTT
tggttgggcacggtggctca

SEQ ID NO: 415352 - DNA, 20 bp, Artificial Sequence
  Description of Artificial Sequence: Synthetic oligonucleotide
  Target: LAMA2; (+) strand; PAM type: YTN; PAM sequence: TTT
ggttgggcacggtggctcac

SEQ ID NO: 415353 - DNA, 20 bp, Artificial Sequence
  Description of Artificial Sequence: Synthetic oligonucleotide
  Target: LAMA2; (+) strand; PAM type: YTN; PAM sequence: TTG
gttgggcacggtggctcacg

SEQ ID NO: 415354 - DNA, 20 bp, Artificial Sequence
  Description of Artificial Sequence: Synthetic oligonucleotide
  Target: LAMA2; (+) strand; PAM type: YTN; PAM sequence: TTG
ggcacggtggctcacgcctg

SEQ ID NO: 415355 - DNA, 20 bp, Artificial Sequence
  Description of Artificial Sequence: Synthetic oligonucleotide
  Target: LAMA2; (+) strand; PAM type: YTN; PAM sequence: CTC
acgcctgtaatcccagcact

SEQ ID NO: 415356 - DNA, 20 bp, Artificial Sequence
  Description of Artificial Sequence: Synthetic oligonucleotide
  Target: LAMA2; (+) strand; PAM type: YTN; PAM sequence: CTG
taatcccagcactttgggag

SEQ ID NO: 415357 - DNA, 20 bp, Artificial Sequence
  Description of Artificial Sequence: Synthetic oligonucleotide
  Target: LAMA2; (+) strand; PAM type: YTN; PAM sequence: CTT
tgggaggctgaagcaggtgg

SEQ ID NO: 415358 - DNA, 20 bp, Artificial Sequence
  Description of Artificial Sequence: Synthetic oligonucleotide
  Target: LAMA2; (+) strand; PAM type: YTN; PAM sequence: TTT
gggaggctgaagcaggtgga

SEQ ID NO: 415359 - DNA, 20 bp, Artificial Sequence
  Description of Artificial Sequence: Synthetic oligonucleotide
  Target: LAMA2; (+) strand; PAM type: YTN; PAM sequence: TTG
ggaggctgaagcaggtggac

SEQ ID NO: 415360 - DNA, 20 bp, Artificial Sequence
  Description of Artificial Sequence: Synthetic oligonucleotide
  Target: LAMA2; (+) strand; PAM type: YTN; PAM sequence: CTG
aagcaggtggaccacctgag

SEQ ID NO: 415361 - DNA, 20 bp, Artificial Sequence
  Description of Artificial Sequence: Synthetic oligonucleotide
  Target: LAMA2; (+) strand; PAM type: YTN; PAM sequence: CTG
aggtcaggagttcaagacca

SEQ ID NO: 415362 - DNA, 20 bp, Artificial Sequence
  Description of Artificial Sequence: Synthetic oligonucleotide
  Target: LAMA2; (+) strand; PAM type: YTN; PAM sequence: TTC
aagaccagcctggccaacat

SEQ ID NO: 415363 - DNA, 20 bp, Artificial Sequence
  Description of Artificial Sequence: Synthetic oligonucleotide
  Target: LAMA2; (+) strand; PAM type: YTN; PAM sequence: CTG
gccaacatggtgaaacccca

SEQ ID NO: 415364 - DNA, 20 bp, Artificial Sequence
  Description of Artificial Sequence: Synthetic oligonucleotide
  Target: LAMA2; (+) strand; PAM type: YTN; PAM sequence: CTC
tactaacaatacaaaaatta

SEQ ID NO: 415365 - DNA, 20 bp, Artificial Sequence
  Description of Artificial Sequence: Synthetic oligonucleotide
  Target: LAMA2; (+) strand; PAM type: YTN; PAM sequence: CTA
ctaacaatacaaaaattaac

SEQ ID NO: 415366 - DNA, 20 bp, Artificial Sequence
  Description of Artificial Sequence: Synthetic oligonucleotide
  Target: LAMA2; (+) strand; PAM type: YTN; PAM sequence: CTA
acaatacaaaaattaaccag

SEQ ID NO: 415367 - DNA, 20 bp, Artificial Sequence
  Description of Artificial Sequence: Synthetic oligonucleotide
  Target: LAMA2; (+) strand; PAM type: YTN; PAM sequence: TTA
accaggtgtggtggcaggca

SEQ ID NO: 415368 - DNA, 20 bp, Artificial Sequence
  Description of Artificial Sequence: Synthetic oligonucleotide
  Target: LAMA2; (+) strand; PAM type: YTN; PAM sequence: CTG
taatctcagctactcgggag

SEQ ID NO: 415369 - DNA, 20 bp, Artificial Sequence
  Description of Artificial Sequence: Synthetic oligonucleotide
  Target: LAMA2; (+) strand; PAM type: YTN; PAM sequence: CTC
agctactcgggaggctgagg

SEQ ID NO: 415370 - DNA, 20 bp, Artificial Sequence
  Description of Artificial Sequence: Synthetic oligonucleotide
  Target: LAMA2; (+) strand; PAM type: YTN; PAM sequence: CTA
ctcgggaggctgaggcagga

SEQ ID NO: 415371 - DNA, 20 bp, Artificial Sequence
  Description of Artificial Sequence: Synthetic oligonucleotide
  Target: LAMA2; (+) strand; PAM type: YTN; PAM sequence: CTC
gggaggctgaggcaggagaa

SEQ ID NO: 415372 - DNA, 20 bp, Artificial Sequence
  Description of Artificial Sequence: Synthetic oligonucleotide
  Target: LAMA2; (+) strand; PAM type: YTN; PAM sequence: CTG
aggcaggagaatcgcttgaa

SEQ ID NO: 415373 - DNA, 20 bp, Artificial Sequence
  Description of Artificial Sequence: Synthetic oligonucleotide
  Target: LAMA2; (+) strand; PAM type: YTN; PAM sequence: CTT
gaacccaagaggcggaggtt

SEQ ID NO: 415374 - DNA, 20 bp, Artificial Sequence
  Description of Artificial Sequence: Synthetic oligonucleotide
  Target: LAMA2; (+) strand; PAM type: YTN; PAM sequence: TTG
aacccaagaggcggaggttg

SEQ ID NO: 415375 - DNA, 20 bp, Artificial Sequence
  Description of Artificial Sequence: Synthetic oligonucleotide
  Target: LAMA2; (+) strand; PAM type: YTN; PAM sequence: TTG
cagtgagccaagatcgtgcc

SEQ ID NO: 415376 - DNA, 20 bp, Artificial Sequence
  Description of Artificial Sequence: Synthetic oligonucleotide
  Target: LAMA2; (+) strand; PAM type: YTN; PAM sequence: CTG
cactccagcctgggcgacag

SEQ ID NO: 415377 - DNA, 20 bp, Artificial Sequence
  Description of Artificial Sequence: Synthetic oligonucleotide
  Target: LAMA2; (+) strand; PAM type: YTN; PAM sequence: CTC
cagcctgggcgacagagtga

SEQ ID NO: 415378 - DNA, 20 bp, Artificial Sequence
  Description of Artificial Sequence: Synthetic oligonucleotide
  Target: LAMA2; (+) strand; PAM type: YTN; PAM sequence: CTG
ggcgacagagtgacaatctg

SEQ ID NO: 415379 - DNA, 20 bp, Artificial Sequence
  Description of Artificial Sequence: Synthetic oligonucleotide
  Target: LAMA2; (+) strand; PAM type: YTN; PAM sequence: CTG
tctcaaaaataaataaataa

SEQ ID NO: 415380 - DNA, 20 bp, Artificial Sequence
  Description of Artificial Sequence: Synthetic oligonucleotide
  Target: LAMA2; (+) strand; PAM type: YTN; PAM sequence: CTC
aaaaataaataaataaataa

SEQ ID NO: 415381 - DNA, 20 bp, Artificial Sequence
  Description of Artificial Sequence: Synthetic oligonucleotide
  Target: LAMA2; (+) strand; PAM type: YTN; PAM sequence: TTT
tatgaaagggaaaagtttct

SEQ ID NO: 415382 - DNA, 20 bp, Artificial Sequence
  Description of Artificial Sequence: Synthetic oligonucleotide
  Target: LAMA2; (+) strand; PAM type: YTN; PAM sequence: TTT
atgaaagggaaaagtttctt

SEQ ID NO: 415383 - DNA, 20 bp, Artificial Sequence
  Description of Artificial Sequence: Synthetic oligonucleotide
  Target: LAMA2; (+) strand; PAM type: YTN; PAM sequence: TTA
tgaaagggaaaagtttcttc

SEQ ID NO: 415384 - DNA, 20 bp, Artificial Sequence
  Description of Artificial Sequence: Synthetic oligonucleotide
  Target: LAMA2; (+) strand; PAM type: YTN; PAM sequence: TTT
cttctctagtattttttaat

SEQ ID NO: 415385 - DNA, 20 bp, Artificial Sequence
  Description of Artificial Sequence: Synthetic oligonucleotide
  Target: LAMA2; (+) strand; PAM type: YTN; PAM sequence: TTC
ttctctagtattttttaatt

SEQ ID NO: 415386 - DNA, 20 bp, Artificial Sequence
  Description of Artificial Sequence: Synthetic oligonucleotide
  Target: LAMA2; (+) strand; PAM type: YTN; PAM sequence: CTT
ctctagtattttttaattaa

SEQ ID NO: 415387 - DNA, 20 bp, Artificial Sequence
  Description of Artificial Sequence: Synthetic oligonucleotide
  Target: LAMA2; (+) strand; PAM type: YTN; PAM sequence: TTC
tctagtattttttaattaat

SEQ ID NO: 415388 - DNA, 20 bp, Artificial Sequence
  Description of Artificial Sequence: Synthetic oligonucleotide
  Target: LAMA2; (+) strand; PAM type: YTN; PAM sequence: CTC
tagtattttttaattaattt

SEQ ID NO: 415389 - DNA, 20 bp, Artificial Sequence
  Description of Artificial Sequence: Synthetic oligonucleotide
  Target: LAMA2; (+) strand; PAM type: YTN; PAM sequence: CTA
gtattttttaattaatttct

SEQ ID NO: 415390 - DNA, 20 bp, Artificial Sequence
  Description of Artificial Sequence: Synthetic oligonucleotide
  Target: LAMA2; (+) strand; PAM type: YTN; PAM sequence: TTT
tttaattaatttctgacctc

SEQ ID NO: 415391 - DNA, 20 bp, Artificial Sequence
  Description of Artificial Sequence: Synthetic oligonucleotide
  Target: LAMA2; (+) strand; PAM type: YTN; PAM sequence: TTT
ttaattaatttctgacctca

SEQ ID NO: 415392 - DNA, 20 bp, Artificial Sequence
  Description of Artificial Sequence: Synthetic oligonucleotide
  Target: LAMA2; (+) strand; PAM type: YTN; PAM sequence: TTT
taattaatttctgacctcaa

SEQ ID NO: 415393 - DNA, 20 bp, Artificial Sequence
  Description of Artificial Sequence: Synthetic oligonucleotide
  Target: LAMA2; (+) strand; PAM type: YTN; PAM sequence: TTT
aattaatttctgacctcaaa

SEQ ID NO: 415394 - DNA, 20 bp, Artificial Sequence
  Description of Artificial Sequence: Synthetic oligonucleotide
  Target: LAMA2; (+) strand; PAM type: YTN; PAM sequence: TTA
attaatttctgacctcaaaa

SEQ ID NO: 415395 - DNA, 20 bp, Artificial Sequence
  Description of Artificial Sequence: Synthetic oligonucleotide
  Target: LAMA2; (+) strand; PAM type: YTN; PAM sequence: TTA
atttctgacctcaaaaatca

SEQ ID NO: 415396 - DNA, 20 bp, Artificial Sequence
  Description of Artificial Sequence: Synthetic oligonucleotide
  Target: LAMA2; (+) strand; PAM type: YTN; PAM sequence: TTT
ctgacctcaaaaatcaaatt

SEQ ID NO: 415397 - DNA, 20 bp, Artificial Sequence
  Description of Artificial Sequence: Synthetic oligonucleotide
  Target: LAMA2; (+) strand; PAM type: YTN; PAM sequence: TTC
tgacctcaaaaatcaaatta

SEQ ID NO: 415398 - DNA, 20 bp, Artificial Sequence
  Description of Artificial Sequence: Synthetic oligonucleotide
  Target: LAMA2; (+) strand; PAM type: YTN; PAM sequence: CTG
acctcaaaaatcaaattagt

SEQ ID NO: 415399 - DNA, 20 bp, Artificial Sequence
  Description of Artificial Sequence: Synthetic oligonucleotide
  Target: LAMA2; (+) strand; PAM type: YTN; PAM sequence: CTC
aaaaatcaaattagttctta

SEQ ID NO: 415400 - DNA, 20 bp, Artificial Sequence
  Description of Artificial Sequence: Synthetic oligonucleotide
  Target: LAMA2; (+) strand; PAM type: YTN; PAM sequence: TTA
gttcttatcccaaaacaaga

SEQ ID NO: 415401 - DNA, 20 bp, Artificial Sequence
  Description of Artificial Sequence: Synthetic oligonucleotide
  Target: LAMA2; (+) strand; PAM type: YTN; PAM sequence: TTC
ttatcccaaaacaagataaa

SEQ ID NO: 415402 - DNA, 20 bp, Artificial Sequence
  Description of Artificial Sequence: Synthetic oligonucleotide
  Target: LAMA2; (+) strand; PAM type: YTN; PAM sequence: CTT
atcccaaaacaagataaaat

SEQ ID NO: 415403 - DNA, 20 bp, Artificial Sequence
  Description of Artificial Sequence: Synthetic oligonucleotide
  Target: LAMA2; (+) strand; PAM type: YTN; PAM sequence: TTA
tcccaaaacaagataaaata

SEQ ID NO: 415404 - DNA, 20 bp, Artificial Sequence
  Description of Artificial Sequence: Synthetic oligonucleotide
  Target: LAMA2; (+) strand; PAM type: YTN; PAM sequence: TTT
cctctacccaaccttgtccc

SEQ ID NO: 415405 - DNA, 20 bp, Artificial Sequence
  Description of Artificial Sequence: Synthetic oligonucleotide
  Target: LAMA2; (+) strand; PAM type: YTN; PAM sequence: TTC
ctctacccaaccttgtcccc

SEQ ID NO: 415406 - DNA, 20 bp, Artificial Sequence
  Description of Artificial Sequence: Synthetic oligonucleotide
  Target: LAMA2; (+) strand; PAM type: YTN; PAM sequence: CTC
tacccaaccttgtcccctca

SEQ ID NO: 415407 - DNA, 20 bp, Artificial Sequence
  Description of Artificial Sequence: Synthetic oligonucleotide
  Target: LAMA2; (+) strand; PAM type: YTN; PAM sequence: CTA
cccaaccttgtcccctcaat

SEQ ID NO: 415408 - DNA, 20 bp, Artificial Sequence
  Description of Artificial Sequence: Synthetic oligonucleotide
  Target: LAMA2; (+) strand; PAM type: YTN; PAM sequence: CTT
gtcccctcaatgatttcctc

SEQ ID NO: 415409 - DNA, 20 bp, Artificial Sequence
  Description of Artificial Sequence: Synthetic oligonucleotide
  Target: LAMA2; (+) strand; PAM type: YTN; PAM sequence: TTG
tcccctcaatgatttcctca

SEQ ID NO: 415410 - DNA, 20 bp, Artificial Sequence
  Description of Artificial Sequence: Synthetic oligonucleotide
  Target: LAMA2; (+) strand; PAM type: YTN; PAM sequence: CTC
aatgatttcctcacctcctg

SEQ ID NO: 415411 - DNA, 20 bp, Artificial Sequence
  Description of Artificial Sequence: Synthetic oligonucleotide
  Target: LAMA2; (+) strand; PAM type: YTN; PAM sequence: TTT
cctcacctcctgccacccac

SEQ ID NO: 415412 - DNA, 20 bp, Artificial Sequence
  Description of Artificial Sequence: Synthetic oligonucleotide
  Target: LAMA2; (+) strand; PAM type: YTN; PAM sequence: TTC
ctcacctcctgccacccaca

SEQ ID NO: 415413 - DNA, 20 bp, Artificial Sequence
  Description of Artificial Sequence: Synthetic oligonucleotide
  Target: LAMA2; (+) strand; PAM type: YTN; PAM sequence: CTC
acctcctgccacccacagca

SEQ ID NO: 415414 - DNA, 20 bp, Artificial Sequence
  Description of Artificial Sequence: Synthetic oligonucleotide
  Target: LAMA2; (+) strand; PAM type: YTN; PAM sequence: CTC
ctgccacccacagcaattat

SEQ ID NO: 415415 - DNA, 20 bp, Artificial Sequence
  Description of Artificial Sequence: Synthetic oligonucleotide
  Target: LAMA2; (+) strand; PAM type: YTN; PAM sequence: CTG
ccacccacagcaattatgaa

SEQ ID NO: 415416 - DNA, 20 bp, Artificial Sequence
  Description of Artificial Sequence: Synthetic oligonucleotide
  Target: LAMA2; (+) strand; PAM type: YTN; PAM sequence: TTA
tgaagaaagcagaagacttt

SEQ ID NO: 415417 - DNA, 20 bp, Artificial Sequence
  Description of Artificial Sequence: Synthetic oligonucleotide
  Target: LAMA2; (+) strand; PAM type: YTN; PAM sequence: CTT
ttcacttattttccaaacac

SEQ ID NO: 415418 - DNA, 20 bp, Artificial Sequence
  Description of Artificial Sequence: Synthetic oligonucleotide
  Target: LAMA2; (+) strand; PAM type: YTN; PAM sequence: TTT
tcacttattttccaaacacc

SEQ ID NO: 415419 - DNA, 20 bp, Artificial Sequence
  Description of Artificial Sequence: Synthetic oligonucleotide
  Target: LAMA2; (+) strand; PAM type: YTN; PAM sequence: TTT
cacttattttccaaacaccc

SEQ ID NO: 415420 - DNA, 20 bp, Artificial Sequence
  Description of Artificial Sequence: Synthetic oligonucleotide
  Target: LAMA2; (+) strand; PAM type: YTN; PAM sequence: TTC
acttattttccaaacaccca

SEQ ID NO: 415421 - DNA, 20 bp, Artificial Sequence
  Description of Artificial Sequence: Synthetic oligonucleotide
  Target: LAMA2; (+) strand; PAM type: YTN; PAM sequence: CTT
attttccaaacacccactcc

SEQ ID NO: 415422 - DNA, 20 bp, Artificial Sequence
  Description of Artificial Sequence: Synthetic oligonucleotide
  Target: LAMA2; (+) strand; PAM type: YTN; PAM sequence: TTA
ttttccaaacacccactcct

SEQ ID NO: 415423 - DNA, 20 bp, Artificial Sequence
  Description of Artificial Sequence: Synthetic oligonucleotide
  Target: LAMA2; (+) strand; PAM type: YTN; PAM sequence: TTT
tccaaacacccactcctacc

SEQ ID NO: 415424 - DNA, 20 bp, Artificial Sequence
  Description of Artificial Sequence: Synthetic oligonucleotide
  Target: LAMA2; (+) strand; PAM type: YTN; PAM sequence: TTT
ccaaacacccactcctacca

SEQ ID NO: 415425 - DNA, 20 bp, Artificial Sequence
  Description of Artificial Sequence: Synthetic oligonucleotide
  Target: LAMA2; (+) strand; PAM type: YTN; PAM sequence: TTC
caaacacccactcctaccag

SEQ ID NO: 415426 - DNA, 20 bp, Artificial Sequence
  Description of Artificial Sequence: Synthetic oligonucleotide
  Target: LAMA2; (+) strand; PAM type: YTN; PAM sequence: CTC
ctaccaggttgtcagccttc

SEQ ID NO: 415427 - DNA, 20 bp, Artificial Sequence
  Description of Artificial Sequence: Synthetic oligonucleotide
  Target: LAMA2; (+) strand; PAM type: YTN; PAM sequence: CTA
ccaggttgtcagccttcttc

SEQ ID NO: 415428 - DNA, 20 bp, Artificial Sequence
  Description of Artificial Sequence: Synthetic oligonucleotide
  Target: LAMA2; (+) strand; PAM type: YTN; PAM sequence: TTG
tcagccttcttctttaaaaa

SEQ ID NO: 415429 - DNA, 20 bp, Artificial Sequence
  Description of Artificial Sequence: Synthetic oligonucleotide
  Target: LAMA2; (+) strand; PAM type: YTN; PAM sequence: CTT
cttctttaaaaaggtgcttt

SEQ ID NO: 415430 - DNA, 20 bp, Artificial Sequence
  Description of Artificial Sequence: Synthetic oligonucleotide
  Target: LAMA2; (+) strand; PAM type: YTN; PAM sequence: TTC
ttctttaaaaaggtgctttg

SEQ ID NO: 415431 - DNA, 20 bp, Artificial Sequence
  Description of Artificial Sequence: Synthetic oligonucleotide
  Target: LAMA2; (+) strand; PAM type: YTN; PAM sequence: CTT
ctttaaaaaggtgctttgca

SEQ ID NO: 415432 - DNA, 20 bp, Artificial Sequence
  Description of Artificial Sequence: Synthetic oligonucleotide
  Target: LAMA2; (+) strand; PAM type: YTN; PAM sequence: TTC
tttaaaaaggtgctttgcac

SEQ ID NO: 415433 - DNA, 20 bp, Artificial Sequence
  Description of Artificial Sequence: Synthetic oligonucleotide
  Target: LAMA2; (+) strand; PAM type: YTN; PAM sequence: CTT
taaaaaggtgctttgcactt

SEQ ID NO: 415434 - DNA, 20 bp, Artificial Sequence
  Description of Artificial Sequence: Synthetic oligonucleotide
  Target: LAMA2; (+) strand; PAM type: YTN; PAM sequence: TTT
aaaaaggtgctttgcacttt

SEQ ID NO: 415435 - DNA, 20 bp, Artificial Sequence
  Description of Artificial Sequence: Synthetic oligonucleotide
  Target: LAMA2; (+) strand; PAM type: YTN; PAM sequence: TTA
aaaaggtgctttgcacttta

SEQ ID NO: 415436 - DNA, 20 bp, Artificial Sequence
  Description of Artificial Sequence: Synthetic oligonucleotide
  Target: LAMA2; (+) strand; PAM type: YTN; PAM sequence: CTT
tgcactttagaagaaaaaca

SEQ ID NO: 415437 - DNA, 20 bp, Artificial Sequence
  Description of Artificial Sequence: Synthetic oligonucleotide
  Target: LAMA2; (+) strand; PAM type: YTN; PAM sequence: TTT
gcactttagaagaaaaacat

SEQ ID NO: 415438 - DNA, 20 bp, Artificial Sequence
  Description of Artificial Sequence: Synthetic oligonucleotide
  Target: LAMA2; (+) strand; PAM type: YTN; PAM sequence: TTG
cactttagaagaaaaacatt

SEQ ID NO: 415439 - DNA, 20 bp, Artificial Sequence
  Description of Artificial Sequence: Synthetic oligonucleotide
  Target: LAMA2; (+) strand; PAM type: YTN; PAM sequence: CTT
tagaagaaaaacatttgtga

SEQ ID NO: 415440 - DNA, 20 bp, Artificial Sequence
  Description of Artificial Sequence: Synthetic oligonucleotide
  Target: LAMA2; (+) strand; PAM type: YTN; PAM sequence: TTT
agaagaaaaacatttgtgag

SEQ ID NO: 415441 - DNA, 20 bp, Artificial Sequence
  Description of Artificial Sequence: Synthetic oligonucleotide
  Target: LAMA2; (+) strand; PAM type: YTN; PAM sequence: TTA
gaagaaaaacatttgtgagg

SEQ ID NO: 415442 - DNA, 20 bp, Artificial Sequence
  Description of Artificial Sequence: Synthetic oligonucleotide
  Target: LAMA2; (+) strand; PAM type: YTN; PAM sequence: TTT
gtgaggggacttttattgaa

SEQ ID NO: 415443 - DNA, 20 bp, Artificial Sequence
  Description of Artificial Sequence: Synthetic oligonucleotide
  Target: LAMA2; (+) strand; PAM type: YTN; PAM sequence: TTG
tgaggggacttttattgaag

SEQ ID NO: 415444-415473 - skipped (30 entries)

SEQ ID NO: 415474 - DNA, 23 bp, Artificial Sequence
  Description of Artificial Sequence: Synthetic oligonucleotide
  modified_base (1)..(21): a, c, t, g, unknown or other
nnnnnnnnnnnnnnnnnnnnnrg

SEQ ID NO: 415475 - RNA, 100 nt, Artificial Sequence
  chemically synthesized
  misc_feature (1)..(20): n is a, c, g, u, or other
nnnnnnnnnnnnnnnnnnnnguuuuagagcuagaaauagcaaguuaaaauaaggcuaguccguuaucaacuugaaaaaguggcaccgagucggugcuuuu

SEQ ID NO: 415476 - RNA, 96 nt, Artificial Sequence
  chemically synthesized
  misc_feature (1)..(20): n is a, c, g, u, or other
nnnnnnnnnnnnnnnnnnnnguuuuagagcuagaaauagcaaguuaaaauaaggcuaguccguuaucaacuugaaaaaguggcaccgagucggugc

SEQ ID NO: 415477 - RNA, 114 nt, Artificial Sequence
  chemically synthesized
  misc_feature (1)..(30): n is a, c, g, u, or other and this region may encompass 17-30 nucleotides;
  misc_feature (107)..(114): This region may encompass 1-8 urasil;
nnnnnnnnnnnnnnnnnnnnnnnnnnnnnnguuuuagagcuagaaauagcaaguuaaaauaaggcuaguccguuaucaacuugaaaaaguggcaccgagucggugcuuuuuuuu

SEQ ID NO: 415478 - protein, 9 aa, Unknown
  Description of Unknown: Homing endonuclease sequence
LAGLIDADG
